United States Patent Application Publication US 2011/0296543 A1 - sequence listing, part 23

SEQ ID NO: 105056 - protein, 97 aa, Unknown
  Obtained from environmental sample
  DOMAIN (40)...(62): MORN repeat
  misc_feature (1)..(97): Xaa is any amino acid
MINPVKGNLTLENGSVYEGDLLDGIPHGKGKLTYSDGSVYEGDFANGKFNGKGTLTYFFGGVYEGEWAHGEQNGHGKMTYTDGTVHEGIFVNSEYAK

SEQ ID NO: 105057 - protein, 140 aa, Unknown
  Obtained from environmental sample
  DOMAIN (1)...(101): CAAX amino terminal protease family
  misc_feature (1)..(140): Xaa is any amino acid
MTLFGGGQEEIGWRGYILPFLEKRYGLFIGSLMLGTIWAIWHIPLFVTPGTNQEQMNFFAFLILLIGLSFFFSWIIKASGNRLLSGLIVHGVLNTFYEYFPLLNRSNNSNQINFWIYSIFIFFIGLIIVIIRTYRDRKNV

SEQ ID NO: 105058 - protein, 122 aa, Unknown
  Obtained from environmental sample
  DOMAIN (6)...(101): Dinitrogenase iron-molybdenum cofactor
  misc_feature (1)..(122): Xaa is any amino acid
SLCHSDGKTINEHFGKAASFLIYDIGKEGSVFIEKRSVTPLNCESEHTEKSLASNIEALKDCTALVVVKIGGPVKKAFEMNGISIFEKSDTIDNALSKLAAYYTKTGGVRNEDTSGLTPILG

SEQ ID NO: 105059 - protein, 78 aa, Unknown
  Obtained from environmental sample
  misc_feature (1)..(78): Xaa is any amino acid
VLAVAMNAYNALKMLGQKSIEKEGRKKLKRKRLGKVIRDLICVAGKLVKHGRELIFKMNQKDQMLPVFLRLNAALDCS

SEQ ID NO: 105060 - protein, 143 aa, Unknown
  Obtained from environmental sample
  misc_feature (1)..(143): Xaa is any amino acid
VDQLLHELGKPAWIVDNPVVGGLTPGVIQKLAPNLAGSGLINTMLNLLNSEPDTPDNKSVAPRPAWWKEAVFYQIYPRSFGNCGTSCVLRGILSKLDYLRDLGVDAVWLSPVYDSPNDDNGYDIRDYYKIQPEFGTMDDMDAL

SEQ ID NO: 105061 - protein, 120 aa, Unknown
  Obtained from environmental sample
  misc_feature (1)..(120): Xaa is any amino acid
GRGFYPGEAPARPGNDSYIGYPYTSVLRTMPVLTNDKMKKQRIVALVFRFLDSFEVKMAPIAAGRKGRTEPLTNIRPPCSGIHKQAFPGTWDEEVQAELTSDEAAPVKILALNAEMAAGA

SEQ ID NO: 105062 - protein, 121 aa, Unknown
  Obtained from environmental sample
  misc_feature (1)..(121): Xaa is any amino acid
MKIAMDMLCRVFSNALDIIEKEQIGATDYHSMRVASLCSAMGKKLGFDDDTLSALCICALFHDNALTEYHLYKNKGGQYEENIILHCEKGQSNVSWLPFKKDIGGFVLYHHECENGNGPLK

SEQ ID NO: 105063 - protein, 263 aa, Unknown
  Obtained from environmental sample
  misc_feature (1)..(263): Xaa is any amino acid
MADGYEDVGNSLRIMENVDLYVTGSNSRILSGEEPQSWQNATKWGGRYIDIRVLPLSFGEYASANAWKKTVTADELFRNYVEQSSFPETLSYVKNGAYDKEGVSDYIDGVYNAVILKDIMTQPGVKNVRLLERVVNYMLANIGSETSINNIAGVLNNDLKLRADEKKLYSSAVENYLNALLNGYLFYKATRYYAKGKEYLKTNAKYYTVDVGLRYHLLGGDSKTDAGHILENVVYLELIRRGYRVNIGRVDSLEIDFVAGKPG

SEQ ID NO: 105064 - protein, 159 aa, Unknown
  Obtained from environmental sample
  DOMAIN (1)...(157): Domain of unknown function (DUF323)
  misc_feature (1)..(159): Xaa is any amino acid
LPVEQVNWADVQEFISKLNDATGMKYRLPTEAEWEYAARGGAMSRKYEYSGSNNVDDVAWYKRGESAKVKKTNPVGIKAPNELGIHDMSGNVLEWVNDWYGRYNYGEEYDPQGPSYGDNRIGRGGSWNRDDRYCRVSFRHYYDPDDRYDGMGFRLARDP

SEQ ID NO: 105065 - protein, 277 aa, Unknown
  Obtained from environmental sample
  misc_feature (1)..(277): Xaa is any amino acid
VRYGKGGTVNASDNEFISANLASEMLAASGLGPYSRIELVNRLAGKQVSNSFWASSYYRGFQGSSTSKDIKTLFEMIYMFFTKIKLDDRAVAAMLDQYKTTLAHQEDDPDNYFSRELRKIISGNHPRFKPLELADLSKVSTEQAFSFINRCINPADYTFVFTGNLKLNEMKDLAAGFIASIPNAPSMNTWVDPRITRPADIEKKLYKGKEDRCTVYLGWFAPSQTAFDESKNQTAAILSEYLDILLTDEIREKLSGVYSISAGSSVSAIPKGEARLE

SEQ ID NO: 105066 - protein, 212 aa, Unknown
  Obtained from environmental sample
  DOMAIN (47)...(75): SecD/SecF GG Motif
  misc_feature (1)..(212): Xaa is any amino acid
MTKKGFGLREWIILAVVLLSGYSLWPSIQYHKNQGAEKVKFAKENPKIVDKSVNFGLDLAGGTSIILEIDKSGLKPDEASDIQERSLEIIRNRVDQYGLSEPQIYPSGNNRIVADLAGVDVDDARNLVGGTAMLEFKIVAEQEKAGQALTLIDNYLKGRNLPMEDSASGVANEANEANEGVAAKEAAKEPTDSETDLLSDESLLLGGKTTEP

SEQ ID NO: 105067 - protein, 125 aa, Unknown
  Obtained from environmental sample
  DOMAIN (4)...(125): Queuosine biosynthesis protein
  misc_feature (1)..(125): Xaa is any amino acid
MVNELPEILCGPELCGKDGGLPLLVFNDSKVRKARLVGTALHTGAQAEFLLVEKMGNSEWRVLVPRAKRRRSGSRYAFFNAEGAEIAQAEIIDEQGEFRILRFDCPIDDAWLDRYGHIPLPPYIK

SEQ ID NO: 105068 - protein, 286 aa, Unknown
  Obtained from environmental sample
  DOMAIN (9)...(282): metallopeptidase family M24
  misc_feature (1)..(286): Xaa is any amino acid
VHKSQYEIAEMKRAVETSLNMHLAAMAMAKPGMTESQIMARVAEIAYASGGGLAFPIIATINGHVLHNHHYGHTLESGQLFLLDAGAETDTHYAGDLSSTFPVDPKFTQKQKDVYNIVLAAFLAAVNALKPGVNFMDIHLLAAKTIASGLKDLGLMKGNVDDAVANGAHALFFPCGLGHLMGLDVHDMENLGEVNFGYKGKPKSTQFGLKSLRLGRELQEGFALTIEPGIYFMPELTDMWKAEGKHKDFINYSALEAYRGFGGIRTEEDFLITDTGCRRLGPPKPR

SEQ ID NO: 105069 - protein, 63 aa, Unknown
  Obtained from environmental sample
  misc_feature (1)..(63): Xaa is any amino acid
LLDAPGNVFIRKKESKMTDDSVIIVAQLYAIDRGRFKKKISKVGKEIMEKVEVGMKLVLGINQ

SEQ ID NO: 105070 - protein, 278 aa, Unknown
  Obtained from environmental sample
  misc_feature (1)..(278): Xaa is any amino acid
DREKWLSLFEENKELMISFLNGKNEMPWRGIDCRVSDEYIQSEKEKSDTAELTPACEDKCGLCGVCGNEIKIVENQYNNHPFLTHNNNITKDNKANTNLFVNLLNNTVYKNEMDPDIYRLLFSFSKSGSAVFHGHLSIIELFSMTFTRAGIPVLYTKGFNPIPKIEFVSPLSTGISAGNEIAAVDFSVPYSPEKFITEMNLNFPQGFRIEKAVCYYIQSGMKKHSLSSLLWGFGYNNKDTVDYVRAKEEKAYRQERLKDSVSPFYLKRNLVLARNMPK

SEQ ID NO: 105071 - protein, 222 aa, Unknown
  Obtained from environmental sample
  DOMAIN (87)...(221): Competence protein
  misc_feature (1)..(222): Xaa is any amino acid
FFPGRNAQRLKEFGRGTSVYAEGNLRPGGAAGGGFSPGAYTFSADALHITKAAPSLERFRTGLRLGLTDRFLNSSGEGKWAGLALALLLGIRDNLDTGFAALYRDAGCSYILALSGMHLAILVSLISFLLKKPLGLRLAAIAGAVIIIAYCFIVGPLPSLNRAALMYLLGVVAVLGMLKRDMLSLLCMAFLLQLILAPASGFSLSFILSYLALAGILVIGKA

SEQ ID NO: 105072 - protein, 280 aa, Unknown
  Obtained from environmental sample
  misc_feature (1)..(280): Xaa is any amino acid
VGFFAAMLTAQSGEHISITAVQYIRNEKVKRILEYISTLVGIFILSILALDCVSFIKYGLMGKSVGFLTDRVFAATMPLGYAVIALRFAFKFKSVRGRVLAFAAILLGVAAGLPAIAKLIWGFYPPQPFFSWVDSLYDLAWFIRFPAILFLIAAALTGMPIFAAIGGIALIMLQSAGLEPEAAPIQIFSALTDTDIIAIPLFTLTGFFLSESKAGERLVRTFRYFFSWLPGGMIIATVIICAFFTSFTGASGVTILALGGILYTILTEHKYTERFSIGLL

SEQ ID NO: 105073 - protein, 63 aa, Unknown
  Obtained from environmental sample
  misc_feature (1)..(63): Xaa is any amino acid
MNLEVGFLTPPVGLNLFLASYRFEKPFAQICRNVLPFLLVQFAVVLLVTYLPWLSTWLPSLMP

SEQ ID NO: 105074 - protein, 154 aa, Unknown
  Obtained from environmental sample
  DOMAIN (7)...(154): impB/mucB/samB family
  misc_feature (1)..(154): Xaa is any amino acid
MPCFIHADIDAFYASVEQLDNPELRGKPVIVGGLPDDRRSVVSAASYEARKFGVHSAMPITQAHKLCSQGIFLRGRMSRYREKSDEIMKIFNDFSPVVEQLSIDEAFLDITGTDKLFGSPEAAARKLKERIRAETGLTVSAGIASNKYVAKIAS

SEQ ID NO: 105075 - protein, 246 aa, Unknown
  Obtained from environmental sample
  misc_feature (1)..(246): Xaa is any amino acid
RFDQWVPNIFSLDIQVPQETSIPYDLNISGFLANGLASGKLVLSMEDMILSIAGDLTAQDTEMSVNAEEIALAREGRGAFGLEDQKVSVITDINVRTGRRVEFFWPSVDLPVIQANADLGTGVHVTSDSMAKRFTLNGDVKLRSGEIFYLERNFYIREGTLFFRENEVEFDPKISARAEIRDQAKIGPVTISMIIDNAPLRSFSPRFVSAPPLSQLEIYSLLGQAPQGGEEAPRNLAMATSAVMDS

SEQ ID NO: 105076 - protein, 199 aa, Unknown
  Obtained from environmental sample
  misc_feature (1)..(199): Xaa is any amino acid
MIKKIYYLLILLIISAPALAAAQTSPSTLKPRGLLLRSASQKDIVETARNHQWSIDFAKSGVDTLLVIAIRVEFEPDTSALTTGNGRFGLKGDTKELKYYNAGNVYKYDGLPHDSLYFDHQLTALKNYYAKASRGGLVLDYSIYPTGGGEVGYRVANPMTHYSPGWKRKEESIDEYWDRKTRGLITFVRDAVKAANDGG

SEQ ID NO: 105077 - protein, 228 aa, Unknown
  Obtained from environmental sample
  DOMAIN (41)...(228): E1-E2 ATPase
  misc_feature (1)..(228): Xaa is any amino acid
MDSLIAVGTTSAVVYSVYNLLQIAEGNFHAVESLYFETAGVIIALILLGKSLEAVSKGRTSEAIKKLMGLAPKTAICIFNGEEKEIPIDEVAPGDIIVVKPGAKIPVDGIVTEGQSAVDESMLTGESMPVDKNPGDPVYGATINSNGRLCFKAEKVGSETALAQIIKLVEDAQGSKAPIAQLADIVSGYFVPVVCAIAFAAGIAWFIAASFGVVNLHAGKTATEFALT

SEQ ID NO: 105078 - protein, 184 aa, Unknown
  Obtained from environmental sample
  misc_feature (1)..(184): Xaa is any amino acid
MLLTLVWLVWIFAREAGLESSAKLGVFLCIACFFAWMSGLIAKPGKPWKNFAILWLVFIITYIFSWNFWIHPQTNDLGATEASEEWVQFSAKKLDSLQSEGLAVWVNGSADWCITCKVNEKVFESEVIRKIFEEKNIVKMRADYTNSNEEALKFFEFYGRSAVPFDLFINSRGNEILMSEILTE

SEQ ID NO: 105079 - protein, 123 aa, Unknown
  Obtained from environmental sample
  misc_feature (1)..(123): Xaa is any amino acid
ATVTTTPPNPAGATAAAIAEAKGKAALAAQAAKEAAKPVDVEAIMEAAVKAKGIKLNWRVSIVDLMRALDLDSSLAARKELAKELKYNGTDPDGSAEKNMWLHKELMKTLAENGGKVPKELMK

SEQ ID NO: 105080 - protein, 97 aa, Unknown
  Obtained from environmental sample
  misc_feature (1)..(97): Xaa is any amino acid
MIRLISIIVVFAIFLCFIMFNLPNKCDISFGFVSFKDVPVFLSALFSFVFGMIVSVPMMFFRKKDKKIPLVPGPSKKAELKATPNEIKKDDSPYGID

SEQ ID NO: 105081 - protein, 232 aa, Unknown
  Obtained from environmental sample
  DOMAIN (1)...(232): Glycoprotease family
  misc_feature (1)..(232): Xaa is any amino acid
VVKEALDKALLKPGDIDAVAVTNKPGLLGSLIVGLSFAKAFAWARDIPLIAVDHMLAHLYASQLNTASSNGNEAPAYPFLGLLVSGGHSIICRADAFDEITVLGATIDDAAGEAFDKVAKHYNFGYPGGLVIDRMAQKGDSGAFRFPLPSLHKGALPRGSEHRCDVSYSGLKNAVINQLDIFRVKKDATPEDIAASFQKTAVEILLRALLNAAQDSGLTDIAAGGGVAANSY

SEQ ID NO: 105082 - protein, 219 aa, Unknown
  Obtained from environmental sample
  DOMAIN (43)...(209): Phage integrase family
  misc_feature (1)..(219): Xaa is any amino acid
AANSYASAVRMALRQAVRKNILLSDPSDGVKGVTFSDPDREYLTLEEVRHLSKTAIGGKLGAEVKKAFLFACYCALRISDLKSLKWSDIENTTNGAQIVKKQVKTKRRVVVPLNDSAWKLINDGTIHNRNMPVFPLLAETKTDTNKYLIDWLKKAGIGKHITWHAARRTCPSLLHEMGVDIYTIQKICGHSRVQTTAIYTQVSDNSLRKAVNSLPKLEI

SEQ ID NO: 105083 - protein, 218 aa, Unknown
  Obtained from environmental sample
  misc_feature (1)..(218): Xaa is any amino acid
MPFAPVNTKERVVIAITGGEPTLREDLPDCGRKLREYGFDWGMVTNGSYYTRSLHSRLLSSGLGSVTVSLDGFEAAHNWLRGNAHSFNKAVNAIDIIASSRLTYDIVTCVNQRNIGGLESFKDFLIKHNVKAWRLFTISPIGRALENPELRLSPEQLKWLMDFIVRSRADSRIKVYFSCEAYTGDYEGKICDGYFFCHAGVNIGFILYDGSISACPNI

SEQ ID NO: 105084 - protein, 194 aa, Unknown
  Obtained from environmental sample
  DOMAIN (7)...(194): Indole-3-glycerol phosphate synthase
  misc_feature (1)..(194): Xaa is any amino acid
LKNPPAILGKIASSTLVRIEKAKETISLEQAQEQAFKLAETEHINKDRLPFESVIAAGGLSFICEVKKASPSKGVIAENFPWLEIAKEYEEGGASAISVLTEPEFFLGSNNYLREISAAVKIPTLRKDFIIDKYQIYESKLLGAKAILLICALLEQQTLKDFIAAARELALDCLVEIHSEDEAQEALAAGARII

SEQ ID NO: 105085 - protein, 71 aa, Unknown
  Obtained from environmental sample
  misc_feature (1)..(71): Xaa is any amino acid
VENAQITRGILAGEKGPRRNAVLLNSAAAIHIVKPEISIKEAIAIAEDTIDSGKASEQLKTFISMSQKKTV

SEQ ID NO: 105086 - protein, 121 aa, Unknown
  Obtained from environmental sample
  misc_feature (1)..(121): Xaa is any amino acid
MYYVNDRPHIGHTYTTVLCDVLARHHRMLGEEVFFLTGTDEHGQKIEKAAAERGITPQQMADEVAPNFENLWKQMGLTQDHFVRTTHQSHVDMVQRRFKELSAKGDIYKDEYEGLYSVSDE

SEQ ID NO: 105087 - protein, 62 aa, Unknown
  Obtained from environmental sample
  misc_feature (1)..(62): Xaa is any amino acid
VSRARNLYTLIGHLPAKEASAAGLMDLADAHARASLPFVSSGNYEGEHWLATFAVHMLEARF

SEQ ID NO: 105088 - protein, 70 aa, Unknown
  Obtained from environmental sample
  misc_feature (1)..(70): Xaa is any amino acid
LRKQFGAKRYNTLLPGEIINTIPPVTMIHNNQIVIIGQNKWKVQGGYPNICHGGMSLLEALVPWIELEAL

SEQ ID NO: 105089 - protein, 153 aa, Unknown
  Obtained from environmental sample
  DOMAIN (1)...(106): MobA/MobL family
  misc_feature (1)..(153): Xaa is any amino acid
VTDNFTSIGMCADVAIHDKGDGNPHAHILLTTRPVTPEGFKGNKERSWDTKPVLVQWREEWAKSLNLEFEKQLLPCRVDHRRLIERGIDREPTKHLGHRVWELERKGIRSDRGDEYRAIVERNRERENRKVREREEQERQRERKRERSLDRGR

SEQ ID NO: 105090 - protein, 246 aa, Unknown
  Obtained from environmental sample
  misc_feature (1)..(246): Xaa is any amino acid
MDDVHSSEEYIVDNWTLEFKRNTNSFFQIVELFKDIISENDYHYLKTDELNKDAHSWCNIVPMPLVASKLTSLLEIIRTNFDSDDNHSNYYSFRRIEENILECNIFLSCTTILIRPWIAPTLTFPPFKSAKQKILMSATLGKCGELERITGMNNIHRLPIVNDWDKKGLGRKFFIFPDLSLKEDLHGDILLRLHKETERSVILVPDKRNAERMEDFFAKYSNMTSIYKAKDIEESKDDFISKNDAI

SEQ ID NO: 105091 - protein, 60 aa, Unknown
  Obtained from environmental sample
  misc_feature (1)..(60): Xaa is any amino acid
MGVLLQAFYWGCPERAGREFEWWDYVKEQIPELAQAGFTALWLPPPSKASTQKAMGYEPF

SEQ ID NO: 105092 - protein, 159 aa, Unknown
  Obtained from environmental sample
  DOMAIN (32)...(159): Thymidylate kinase
  misc_feature (1)..(159): Xaa is any amino acid
LWGLTWAFAKMSIDLAKRPHLESFLGGLLITLEGIEGSGKSTQMRFIHSRLSCLDIPHVCSREPGGTSLCADLRALLLTQHPSGEKWTPLAELLLFSADRAQHIEAVVWPALKDGKVVVLDRFEDSTRAYQGAQGISPSTMSALGQLVLDGLKPDLTLL

SEQ ID NO: 105093 - protein, 141 aa, Unknown
  Obtained from environmental sample
  DOMAIN (5)...(141): Bacitracin resistance protein BacA
  misc_feature (1)..(141): Xaa is any amino acid
MEILKTLFLGIIQGLTEFLPVSSSGHLIIAETFMGGSKPEVGSAMFLEVMLHVATGIAVLFVFRKDIINIIRGCLSADASLRKNSLAYCGFVILATIPAVIVAFLFKKQIDALFDTDPSKGNTAAYIASFMLFVTAALLFF

SEQ ID NO: 105094 - protein, 247 aa, Unknown
  Obtained from environmental sample
  DOMAIN (1)...(245): RecF/RecN/SMC N terminal domain
  misc_feature (1)..(247): Xaa is any amino acid
MLRELRIKNLALIENLTLDFRPGFTVFTGETGAGKSILIGAIGLLLGERASSEMIRSGCEDAEVSGSLDIENIRHKLREFLREASIDAEDGSLIIRRNISKSGKNKIHVNQVPLPLSTLKALGDLLIDLHGQHDHQSILNEETHADIVDALPEASAAKTAYTSSYNTHTAATQELRNAQRAARELTDKKDVLEFQYKELSTLNPQRGEEATLEQELSLLSTSAERSKCVSEILTLLGSNDIGVTSGG

SEQ ID NO: 105095 - protein, 253 aa, Unknown
  Obtained from environmental sample
  DOMAIN (64)...(229): MatE
  misc_feature (1)..(253): Xaa is any amino acid
AYTLSPFTKNPARAMAYGILIGGFLEAAIQFPFVLKNGQRFFFTGIKKAFANPGTRKVLRLIGPTIIGMAAYQLNDLVSTALAGNAGEGIVSSLQYSLRLQELILGVFAVSIGTVLLPNLAEYAKSSQWKNFNDRLASAMDIIALITVPITFFSLAQGEILIRLLFQNRSFDENSVKLTLSAFTFHMPGLLFIALNRILAPAFYAQSDSKSPTFAGIISFAANITLAAVLVRDYRGAGIALALSVASVVNTVM

SEQ ID NO: 105096 - protein, 257 aa, Unknown
  Obtained from environmental sample
  misc_feature (1)..(257): Xaa is any amino acid
MSATGPDDNNATQKIDTGTGTVKMNDNDATQKIDTGTGTVKINDNETTQKNINVGGGGVIPGSLVISGMENAAGSMPQQNAQKFAGTSGNTGEFFRDGDVIEINGRNYTIEYCISRSSGEANIYKINKNGNPCVLKHYKVDKEGKPMKPPMDVLEQIKENPRDMIIKLVDFGKHNVQYYEIIEYAEGGTLNDYLKDNGPIKDTAILKRIVGQIAKGLQQLHDLRIIYQDLKPENIYFRDAKKTEIILADFGISSVMK

SEQ ID NO: 105097 - protein, 268 aa, Unknown
  Obtained from environmental sample
  misc_feature (1)..(268): Xaa is any amino acid
VQPDGGQSIKISSKTYQTPEEVAAETDSKQIAHIKEAILEEDSLFLVWLSDHYGEFFSTTGGFYKLNSQDRFYLLSLFPFLSYKEFVQNWEQAAINDLVLMIHSCSGRFDLFEAYAAQGLPFSGQSSGLDWRPTALGYLTSFLTEITDITTGLELVHFLYKHGANINEESGNGTFSLFNAVCKRNVPLVELLLKLGASPNKTQQNIAPLFWTLYNLEENEEEPNRIAIAHLLLNYRANANIVDDHGRNALSIAVKLESLEKVELVSRL

SEQ ID NO: 105098 - protein, 63 aa, Unknown
  Obtained from environmental sample
  misc_feature (1)..(63): Xaa is any amino acid
VYFRDYSDLEILDYISTMEYADKAGAYGAQGKGARFIKSINGCFYNVMGLPIALTLEALNKVE

SEQ ID NO: 105099 - protein, 164 aa, Unknown
  Obtained from environmental sample
  misc_feature (1)..(164): Xaa is any amino acid
MAEENENDLNLGENERVGDYLHRIRKIRGLELENLAKSIRLGKNILEAIESNNWSYFPTEAYLRSYIVSLCDKLSLDKNIVLKKFSAEINSQFWITQTNIMGDSEQEKDSPDSPSSNVPKAAIIIILVIIAILFFVSKMLNNYSKEDEDEFDMEEFPKIEESRS

SEQ ID NO: 105100 - protein, 266 aa, Unknown
  Obtained from environmental sample
  misc_feature (1)..(266): Xaa is any amino acid
AAVEAYITDATTDPDNPEDILVAEGATEEEFTVAEQKITDVKIKFKAKSTDATGKFAFSITWPTKMTNKITLNPDDVVDLVIVDTITLMPWPPSGDPDDDIDLTGSVITTDTTANTATKALEAIDLPVGTYLLTVRIEDTTNGEFAGLFEAVHILPGLTTTFTKTFQAADIVHVAYGVYFDLNYAGAPANPDTIAVVFPETNIGSSGKQIPVPTRAGWLFRGWFFNKEGTGDELTLATPVTDADITVYAKWEQGYTVTFDKNTGTI

SEQ ID NO: 105101 - protein, 111 aa, Unknown
  Obtained from environmental sample
  misc_feature (1)..(111): Xaa is any amino acid
TDAAVDVNIYARRRDAFTAILDEAGIEYAVPEGAFYLFCKVPSKKEGAKEPCGSVEPGDDSAFVNHLKQHLILGVPGTGFGKPGWLRFAYCVDERNIRASAAAFKRAMEEW

SEQ ID NO: 105102 - protein, 264 aa, Unknown
  Obtained from environmental sample
  DOMAIN (1)...(264): Protein of unknown function (DUF1703)
  misc_feature (1)..(264): Xaa is any amino acid
MSIKRLFIKDLIDRDAEVVLCTRPRRFGKTLNQTMLKCFFEDTAPIGGKDTRALFRGLKIEDAGKRYMEYQGKYPVIFLSFKEGKSNSFDGSYDLLKDCIAQEFERHTYAMEKISNDYDRDLFKKLSTRTGSISDYVRSLKFLSRCLDCYHGRKTVILIDEYDVPLENSWSCGFYQNMIDFIRPLLGSALKDNPHLQLSVMTGCLRISKESIFTGLNNLSVVSILSDFYSERFGFTQNEMDIMLEYYGLERQTQIIKDWVHGYL

SEQ ID NO: 105103 - protein, 249 aa, Unknown
  Obtained from environmental sample
  DOMAIN (1)...(169): DEAD/DEAH box helicase
  misc_feature (1)..(249): Xaa is any amino acid
MPVQEYALPYLLAGRDLMVQSRTGSGKTGAYLLPLLDRIKAGQRAVQALVLVPTRELALQVTHEANMLAAGTPLATVTVYGGVGYGKQVEALRQGAQLVVGTPGRVLDHLLRRTLTLDALNALVLDEADRMLSIGFYPDMKEVQRYLPKRRVLTGFFSATYPPHVLKLADEFLFEPSMLSLSHKQAYVAESEHILCECLPMDKDRALMRVLETENPASAIIFCNTKANVHYVTAVLQGFGYDADELCAD

SEQ ID NO: 105104 - protein, 247 aa, Unknown
  Obtained from environmental sample
  DOMAIN (145)...(178): Tetratricopeptide repeat
  misc_feature (1)..(247): Xaa is any amino acid
MAHHHRTHYHATHYHTRNRNAGVKYEEGKTVEWFFDFLFSNTGGWLGLLLGLIFGIYTVRSGKTLIFDDDSMSMVFGIPLVTLAVGVAGATIGTIISFITKRGEPITVWSEKIVKRGKDHLEMGDIDKAIELADKALRSGAIDFPGGHQLRGDAFLEKNDFDKAVDEYTKVIKLRPDKPGGYCDRCGAYLIKGDYYRAIEDSTEAIRLGKSLFLGYIYRGKAYYLKGEIHKAVADYSDALKDYPGYI

SEQ ID NO: 105105 - protein, 120 aa, Unknown
  Obtained from environmental sample
  DOMAIN (1)...(107): Protein of unknown function (DUF1016)
  misc_feature (1)..(120): Xaa is any amino acid
KAVPFDEDHFVVDLVFYNRLLQCYVLIDLKTGKLKHQDLGQMQMYVNYFDRYVKTDAEKPTVGILLCKEKNDNIVELTLPKDTNIYASAYNLYLPDKALLQRKLTEWVEEFEEEHGGNCK

SEQ ID NO: 105106 - protein, 263 aa, Unknown
  Obtained from environmental sample
  misc_feature (1)..(263): Xaa is any amino acid
MTKARVVFHRFLFRRCFRLCCAAAAIVLSAWMNVAHAETIQFSAPVNGWRNSAGDDARYTQDVHYPAVAVNTPENQSANALIAGRIKDSPKAATRKKDSASVATLVVNGLPLPQRIGADGAFSRPFAFGAGSNSVELRTASGTRKRVQFYDAYAGKPQARLRAVLAWDTDGTDLDLHVVSPDGSHAYYGNRTAPDGGALDVDVTTGYGPEIYSNAAPQSGTYLVYVNYYGSGENAGHVTVAQVTIITDAGTLHEKRETVTAPM

SEQ ID NO: 105107 - protein, 87 aa, Unknown
  Obtained from environmental sample
  misc_feature (1)..(87): Xaa is any amino acid
VFPACRGEKKDSEPQPFARTASWETGELGYHQPIPVLDRRVVLRQLVRFALPGDFAMPPARYFRMYQPEQKAYEGGRSDHATTWSIR

SEQ ID NO: 105108 - protein, 204 aa, Unknown
  Obtained from environmental sample
  misc_feature (1)..(204): Xaa is any amino acid
VRQAKIAPAAYRWALALALMLPPLFPSSAPAAQISALPAPVSPLRFAWLRDGDARLWTFSPAAKPMPAGSGAPLPPALETPLGSIWKLFVYVYLVDRQIAAPDYECAGKDREEAYCCAAGDRIDRDRALAQSCGLFFDARRLRLDPEDWRRYWSALQAPEWMRDLDAQRPERRVRVIELLSALQAVPARVRDEAGDTLVSVVTS

SEQ ID NO: 105109 - protein, 193 aa, Unknown
  Obtained from environmental sample
  misc_feature (1)..(193): Xaa is any amino acid
IGIFCNIKQKLKLTDEKDAIIELAKGKRTTDKSRHSGQGIFFTSKAFEDFIIISKGITYAANQQKDINIKTGRAKFSTFVYMRLANNSAVILKDIFDKFSTEVPGDFDRTIVPIILTNTDDLVSRSQARRILSGLELFKEVILDFKNIENIGQAFADEIFRVFPNRNPDTRITAQNTNANVQYMINRAINTKL

SEQ ID NO: 105110 - protein, 181 aa, Unknown
  Obtained from environmental sample
  misc_feature (1)..(181): Xaa is any amino acid
VAERTKIDELRLTTRDVADYDELMRHRLKILDERDIKLSDIQKVIASLPLLDGARAFLDELRTFCQVIILSDTFNDFAKPIMKKLGYPTLFCHDLEIENDKIIGYKLRQINQKQHAVEAFKSLNFNVFAAGDSYNDIAMLKAADRACLFRAPDSVKKEFPQFKAVEEYEELMAEVLTPSAL

SEQ ID NO: 105111 - protein, 229 aa, Unknown
  Obtained from environmental sample
  DOMAIN (118)...(194): Domain of Unknown Function (DUF349)
  misc_feature (1)..(229): Xaa is any amino acid
LIKEIEELANAPVVLENRAKAFAMLEQWKAAGYMPALKIQEFWPRFKAGLDKVMDSVSPLLKEQEQSQEENLKVKEDICAQIETLAAAEGEWSEQLRKVQELQLKWKNTGFVPKTQNHVIWERYQAAINSFFKKQEAYKKRNLEQISERIAAREKLCEEAEALSTSTDWKNTPKVFTKLSASWKAAGSVPTEEYEKLLERFKKASDTFFERRNSFFENARKGREGVCQK

SEQ ID NO: 105112 - protein, 78 aa, Unknown
  Obtained from environmental sample
  DOMAIN (3)...(78): Bacterial DNA-binding protein
  misc_feature (1)..(78): Xaa is any amino acid
MNTTKHDLVAAVARETGLTQAEIKIVVEEFLEAIAEELERGRTIEFRGFGTFLVKERQARPARNPRTGEVVPLGRRMV

SEQ ID NO: 105113 - protein, 123 aa, Unknown
  Obtained from environmental sample
  misc_feature (1)..(123): Xaa is any amino acid
MNIPVEIKTAYIEKIVNDEFNGKSYNSDTTLLGGRTNIKVSARKNGSVKIRAQGDELAYNLPVMVTMRASTSISALGLSHTIQQDAEAGITFNLRSRVSLKKDWRVASTTKATGYKWTTEPVF

SEQ ID NO: 105114 - protein, 82 aa, Unknown
  Obtained from environmental sample
  DOMAIN (8)...(75): Phosphopantetheine attachment site
  misc_feature (1)..(82): Xaa is any amino acid
MTKEDIFQKIKEILNEEFEIDKEAIVPDARLYQDLELDSIDAVDLLVKMKGFIPGKIDPESFKKAGTVQDVVDILYPLIKQT

SEQ ID NO: 105115 - protein, 143 aa, Unknown
  Obtained from environmental sample
  misc_feature (1)..(143): Xaa is any amino acid
MATIYSIKRSLVRFNAAQLCVLLLILAIFTIAFIFPLGMLFSKAFTGESGAFAGFANYKSYFGNPSLSVSVWNTIDISLVTTIFSTAFGFLYAYAITRTNILGKSFFKYVALVPIFIPTVVHALGLVYIFGRAEALLHASVLI

SEQ ID NO: 105116 - protein, 279 aa, Unknown
  Obtained from environmental sample
  DOMAIN (86)...(249): Integrase core domain
  misc_feature (1)..(279): Xaa is any amino acid
RTELRSKSSVEEIKTIRGRHQRIGVRKLQTLLGPFMQEHEIKMGRDALFDLLSYHGMLVRKRKRHVKTTYSYHWQRKYPNLIAEFIPSRPNELWVSDITYWKLGDQAVYLSLITDAYSRKIVGYQLSEDLNASQSVKALKKALSGIGHRTVLSDQLIHHSDRGTQYCSSSYVTCLRKHHIQISMTQSGDPLENAIAERVNGIIKDEYLLNYPCKDLAGARKYLDKAVSLYNKERPHSSIGNLTPEFVHNQYYLIKDEKIKRLWKNYYQKKTIFANQIQD

SEQ ID NO: 105117 - protein, 286 aa, Unknown
  Obtained from environmental sample
  DOMAIN (26)...(164): CheW-like domain
  misc_feature (1)..(286): Xaa is any amino acid
SIVRDLEQVNADLQEQKERVDNVDFKMVTFSLSGKDYGVDIMSVKEIAKADKFTYVPNAASFVRGVYNLRGDIIPIVDLRQFFHLPSEKKREGLENMLILHINDQVYGTIVDKIDKVVGIQKDSIQPPHPIFGDINIKYISGVVEKQGDLYIILDAVRIFSVKEEDKSKAHSSVAEGEFFVPPPAAATEQASGQKAAANTAIGFIQESLAALRHFYATDINNNWLYRRFAEWSSRRSGEELQLRSATEADEFLDGFASPCTSQFWSESYVTAIKKVLPNVTTPNIN

SEQ ID NO: 105118 - protein, 254 aa, Unknown
  Obtained from environmental sample
  misc_feature (1)..(254): Xaa is any amino acid
MPLVSRQFRHFWLIAVFAVVAQAGVIEISSFSELCLIGVDDGYPLDGDYKLVADIDASGSRDLDGGAGFLPIGRRRVVLPSIGFGVPDVIDSAMAFTGTFDGGGHRISGLYIKRYAAGANTNVGLFGFAFRAKIRNVTVAVDTVAGYRYIGALVGRQSGGVIEGCVSLGAVAGGADVGGLVGTIEEGGEIRASYSSAGVGGEIVGDIGGLAGSADGAEIIGSYAVGSVTVGGGGNVGGLAGSLLNVAKVRSCYS

SEQ ID NO: 105119 - protein, 76 aa, Unknown
  Obtained from environmental sample
  misc_feature (1)..(76): Xaa is any amino acid
LQEYNIESAYHKYNNCINGSEKDPTLLWQMNINNKFHIDYCFISENYKIKSANVGSLQEWEETKLSDHCPLIIETE

SEQ ID NO: 105120 - protein, 261 aa, Unknown
  Obtained from environmental sample
  DOMAIN (1)...(228): ABC transporter transmembrane region
  misc_feature (1)..(261): Xaa is any amino acid
MMIVQLARLGLNYLQIILMEIASTDVMTRLRRDMYQTVQWQDYKFLSRFPTGNLMTRMTQDMDSLRHTVAWVSYQFIGAIALFAATFIFYLFLNWRLALCLVGITPFILFISSRFVKKIRPRFQLLREKLTNLGTAVTENIDGNRVVKAFAREEYEKEKVEKQNAEFRDINCENALITAKYQPLLETASQLLMVIMIVVGGFFLIKEWMTPGEYMAFSSLTWALSMPMWMLGPLLADLQRYTSAGQMIREVVESPKGISDI

SEQ ID NO: 105121 - protein, 272 aa, Unknown
  Obtained from environmental sample
  misc_feature (1)..(272): Xaa is any amino acid
MEDVFAYTKFLDFWRKATPETPYGKDALKEPHLFFDVGQLEKIYDETEALIYLLKELQNDPARLSLISHHLKQLPRLPFGPHQSQKEGSFDEIELFQIKKFLHNYRALMAQLPPKAQRAFGFEYSSQSLEERLNIGQLNPESFYVADAYSPELQKNRREILEADEAVQRLEAERAAEILKKFGLDFCGQPFLLAPKAKLGDLASASKILAIEPYDDTLFYVRPLRCAASLAIAERRLELAQRERTCEMAVLESLSQDVCKEMTNLDKYIAAA

SEQ ID NO: 105122 - protein, 149 aa, Unknown
  Obtained from environmental sample
  DOMAIN (12)...(149): short chain dehydrogenase
  misc_feature (1)..(149): Xaa is any amino acid
MEFNDKFSLKGKVAWVTGGTYGIGFAIARALHKAGATIVFNARNIDNGLEAYKAEGIPVHGYVCDVTDEKAVNETAVKIEKEVGVVDILVNNAGIIKRIPMTEMSAADFRQVIDIDLNGPFIVAKAVIPSMIKKGGGKIINICSMMSEL

SEQ ID NO: 105123 - protein, 282 aa, Unknown
  Obtained from environmental sample
  misc_feature (1)..(282): Xaa is any amino acid
SGSVSGTPLSLGGVQSKPAAKTSDSQTGEDPFNGIGIPISPWATDDADKEKTTSSEILVPPVLSQTFSLPSAGNIKFNIDYSLSPTTSSEMQFNTDKWSTYEDIDWNDSKSILTSVSGNTNLNFRIDHSTGLFSNTISFSGNGTWRDYSYLNEEVYTDPKTGVVDKKKMETDRQQQYALTNYMSSYSYNGTVKPFISDPLFAQTNFQYSFRGTLVKSKRYTDGDGPELTPEWGAWVKEQRTDGEDILGLNSHRLTANLSAKLFDKDQNISFSSELPPLDGLY

SEQ ID NO: 105124 - protein, 281 aa, Unknown
  Obtained from environmental sample
  misc_feature (1)..(281): Xaa is any amino acid
KEDINEWFFGRGIPAKRNELSEILDCNAVSSREELVVKNYGLCLTDNYWIQKESENLKWDNINFWDNDFTQEKDNVYLGQPPENIMLLQSKNTEITPNNVSSGMLPKTWKRIDGDLYMIKGADTRLQEPFNESVVSQFLEKLKIEQVSYELYWHKELPFSKCPIMLKKGEELIHSFYLNKMSEKENNVSYYEHYINQCVSMGLSKNIRKDLENMILVDFMIANTDRHWSNFGVIRDSDTLIAKKLAPLYDHGASFYTKYHTLIIPNTLQTLKCSLLKYSMA

SEQ ID NO: 105125 - protein, 214 aa, Unknown
  Obtained from environmental sample
  misc_feature (1)..(214): Xaa is any amino acid
MTTPPREVIIDLKYDNVEITADIAPFLQSVRYVDRTLSNKMDELSITLQDVDVLFIDEWMPDRGAKLEAKIKAFNWFEYGDIFERDCGGFEIDDITSSAPPSIFQMSAISVGITNSIRRQQNTKAWENIAIKDIADEIASEHGFELKWYSDDYNPVMDRWEQKGQSDLSLLIDICEYAGLMIKITDKYLVIFNGEEFDAEEPEVTIVRSEGVVK

SEQ ID NO: 105126 - protein, 259 aa, Unknown
  Obtained from environmental sample
  misc_feature (1)..(259): Xaa is any amino acid
LQAILENKKHDNSGTRYSYDTIIIGASGTAKTLISNLIADLFFRFGMIAKGKPEKIDGASLNGMSKKDIDSLFSKAKGGMLFVDNAQKLLDSEGKAMAAFSHFIDAMDANKDDPVVLMAGLPVGLREMVKSSESANKQIVNRFEKIFIIPDYTPDQYAKITENELKKQSFTFNSEFSEKLLQRFRYLYKELKKPDNNIKSVNGYLALKEAQAIAGCYYLRKASDKIILPEDIKGNVDEKKSLQEIMAELDAIIGMAALK

SEQ ID NO: 105127 - protein, 253 aa, Unknown
  Obtained from environmental sample
  DOMAIN (104)...(134): Putative Fe-S cluster
  misc_feature (1)..(253): Xaa is any amino acid
LVDCLNCEKGCNGGPGTGNHNKPLPVLENPIRKRKAKLEGQLKPQKGDAGLKKYNQDLGKYWKKNLYNRTYKDLSGNNALKTPDEEELKAVFKRLKKFEKKDIYNCTSCGYQSCELMAKAIFNNLNKPENCAHYNIELLKEQTKTEELNRLLKEHISRTTILIEKISKTVHDLNETIEMQAQSVKESSHKTASMIESLSSTSEVSRNKQNDIQELLDNATQGQKSMKETIQSVQSISQSVDGISSAIKIITAM

SEQ ID NO: 105128 - protein, 273 aa, Unknown
  Obtained from environmental sample
  misc_feature (1)..(273): Xaa is any amino acid
IKTKNYFDEIYPADKAERAALFDQLADIAKFIGKKNTKFNESVFPWFTQELNVSAPCGVMLGLAAYDRSAELIRQITDFVPIMTSDQRLAYYSSLLEPETPEHRTFLLEGLSDKSQTVRERIVNRLQYYQLDKADMERLTETLTTQNAGLRKGIITLLNKQKESLIRPVIESLLNSANKNQLIAGVELLDVFSKNNPSLQNNYKDKIAALTAKENLSQDVSILLEKVTPGKREIDNYTEENGYGLYDPNAEVFDYAVFASKRPNVRFVGDKET

SEQ ID NO: 105129 - protein, 276 aa, Unknown
  Obtained from environmental sample
  misc_feature (1)..(276): Xaa is any amino acid
DRKNKNDALERYEFIQKFKKESKQFGSLRQTSEGKACVIALENLAITTGYGDADRMIWALEGAKIEQLRPLTEPRITGSGGTEVWLSIGDDGTPDLNIRKNGAPLKTMPKEIAKDPYVSELKEAVKELRDQKRRAKTSFETAMISRAGFSATELTGLLNHPVLRSMASSLVFTNGDRLGFPMLDGGKPALIGADDKSFPVKEGEQIIIAHPYDFISRKCWSDYQKYLYHNEIVQPFKQVFREYYPITEDELNAVNVSRRYAGNQVQPKKTAALRKR

SEQ ID NO: 105130 - protein, 267 aa, Unknown
  Obtained from environmental sample
  misc_feature (1)..(267): Xaa is any amino acid
VNDNDLIKLLLELGADENQYHEYLYNQLVQAKDGASSENEYRDLAKKFLGMNGYKDTKALADDCEKQIRILKERIKEEERKERERRAEQERQEAEQEAREAEAARQAKAEQEAKQAKRVAEEKARQDKLAIEEKAIKRKELILHLCLCAAYLYFLYGIDIIYTPVKAYFVLKTGVLLPLAIFSLVIGIANLIFFNYKNTSSGFWMLIIIILVQSITESVWSNKGFLGFLLYFVVNILCAIPGTLLLFMAIGIASSHESNATVSGTAK

SEQ ID NO: 105131 - protein, 247 aa, Unknown
  Obtained from environmental sample
  DOMAIN (2)...(247): Acetyl-CoA hydrolase/transferase
  misc_feature (1)..(247): Xaa is any amino acid
DIPSGNAFYTPIRYSELPRYYRENMDPTDVAMFQVTPMDRHGYFNFGLSASHNAAMCERAKTIIVEVNQNLPRCLGGHETCIHVSQVTMIVEGSNPMPVVLPPGASHPADEAIARLLVDEVPSRACLQLGIGGMPNTVGRLLAQSDVKDLGVHSEMYVDAFVELAEAGKITGAYKNSDRFRQVFTFAAGGQKLYDYIHDNPEIMSAPVDYVNDIRVVAGLDNFISINSAVEVDLFGQINAESSGTRH

SEQ ID NO: 105132 - protein, 194 aa, Unknown
  Obtained from environmental sample
  DOMAIN (62)...(176): PCRF domain
  misc_feature (1)..(194): Xaa is any amino acid
MQEKVQKFLERYEELEQELSKPDVASNPEIFTKLHKSFKALEKTHIVGSEYIRLCSDLKEWKEALSGNDQELAQAAKTEISPLEERIESMESELQVLMVPPDPFDNRSAILEIRAGTGGDESSLFAGDLFKMYRAYLENRGFKVEVTDISEGTVGGFKEICLFVSGTDAYGVLKFESECAQSAARTRNRIAGKG

SEQ ID NO: 105133 - protein, 292 aa, Unknown
  Obtained from environmental sample
  misc_feature (1)..(292): Xaa is any amino acid
DSRPSGNEWTVEYNGEFISAINGPEKTKVQYVYSGDNLVSVKDKEGDTNKYNYNQDRLSEMVKPDGSAIRIEYGYASSGGALLVTATTHEEGASEKFEYNPAQKTTTYTNYSGIITRYWYDNKHRTIREEHSDGRVKTFAYNGADLLERETLNGFEIRYSYDGRGNVTEKQYSDGKKESWQWSGNDQLLRYSDRDEVTTELHYDSRWNCIEIRRGGQMIYTARYDQQNRLTTSREGNRSEIRYEYDDRDFIGSESITINGKEIREEWKYDALGRVLKYTDALGRVWEYAYYD

SEQ ID NO: 105134 - protein, 292 aa, Unknown
  Obtained from environmental sample
  DOMAIN (1)...(161): CbiM
  misc_feature (1)..(292): Xaa is any amino acid
AFVFAAQMINFTIPGTGSSGHIGGGILLAAMVGGFPALISITAVLIIQCLFFADGGLFALGCNIFNMGVIPCLIVYPLVFKPIAKKEMTAGIISLASIAAVVAGLQLGAFGVVLETQLSGITGLPFAAFALLMQPIHLAIGIVEGIITAAVLCFVCKTRPEIMESVFNRTAIISPVKKVIITLAAVTLFTGGVLAVFASSYPDGLEWAIEKTSGTAGLETKGAVMESASRVQKTAAIMPDYGFKDAASTDGAGSGAGTSVAGILGSLLTFLLAGIAAFTIFTVKNKPRKKVL

SEQ ID NO: 105135 - protein, 174 aa, Unknown
  Obtained from environmental sample
  DOMAIN (1)...(142): ABC transporter
  misc_feature (1)..(174): Xaa is any amino acid
EKKTVNEIRKRTGLVFQNPDDQLFMPLIYDDVAFGCRNHGMPEDQIRIRVDETLKQLNISHLRGRSSLRLSGGEKRLAAIASILAMEPSILMFDEPTAFLDPKAKRSLLETLKKLNHTKIIATHDITFAAKVCGRVLLLKNGRIAADGMTDILYDKELMAHCELEAIEGRNCNL

SEQ ID NO: 105136 - protein, 196 aa, Unknown
  Obtained from environmental sample
  DOMAIN (3)...(196): Rhodopirellula transposase
  misc_feature (1)..(196): Xaa is any amino acid
MGERIREIIDGSTYGNPEKVLSWTTESLRSIQKKLGEKHDISVSHVTVGAILEAMGYSKQANQKMLQVGEPHPDRNAQFEFIDKKTKAFIDAGEPVISVDTKKKENIGNFKNPGQEYRRNSEPREVLDHDFPIEELGKIAPYGVYNLNYNIGFVNLGTSKDTAEFAVESISRWWETVGKHTFPESTKLMITCDCGG

SEQ ID NO: 105137 - protein, 249 aa, Unknown
  Obtained from environmental sample
  misc_feature (1)..(249): Xaa is any amino acid
LPGGYRWSDDFASVGDNGYWWTATEHGNNNRAAYRAGMYFYGSRTYWYGVDKNTGASARCVQDGIIAAEETWKKESEQQKKKREAEERKTTEQQIEKNTTYFADSRDGKKYRAIKIDGRTWMAQNLNYHTAKGSWCYNDDKSNCGKYGRLYNWETAKKVCPSGWYLPSYREWNNLVFTATSGDACVTGGGWAGMRLKSKSGWRYSYNDDRYSSTDEYGFSAQPGGYRESHKNFCYDDDESDNGEEADDG

SEQ ID NO: 105138 - protein, 129 aa, Unknown
  Obtained from environmental sample
  misc_feature (1)..(129): Xaa is any amino acid
MTDIIGAYMERVSSATNEIFEQLLSSETAFPCPIHGLMRYSCFAGGKRFRPCLVMAAFEACGGRSGDEKVLTVAAAIEMLHTFSLIRDDLLCTDADDLSRCRLTYKVVNEALTIFGGDILAVIAIEMLV

SEQ ID NO: 105139 - protein, 179 aa, Unknown
  Obtained from environmental sample
  misc_feature (1)..(179): Xaa is any amino acid
GIDGQRVTEIGFRSFAFALGNSPIDCTGLVAIDSVVLPSNLIEIGGDAFKYQPLTSISFPASVRTIGEASFLGNKFTSVVIPNGVKLVGQFAFTDSATLTTVTIPASLTAYAEFSSNYPTPTAGFANAFRYGDGAVTRITLPANVDPSNLRSTALRDAYVGNGRKAGTYVWTGRIWRVE

SEQ ID NO: 105140 - protein, 261 aa, Unknown
  Obtained from environmental sample
  DOMAIN (3)...(199): Amidohydrolase family
  misc_feature (1)..(261): Xaa is any amino acid
MRSLILVNVGKKYGINYLGTPATGRAAPSLVLGLGEFMNYPGVVDRDEDVLDKLLVARANGLLMDGHSPGLAGQKLSAYAAAGIRTDHKCVEPQAVLDRLARGMYVHLREASSSHDLLKLLPALTPANLRRCLFCTDDREPADILARGHISNSLALAVQAGLDPLAAVSIATLNAADCYGLKGKGALAPGYDADLVIVEDLKEFKPRHVFSRGREVAREGRFLAEKELPPPPPRGILNTVRLAPLTLADLALPLAATGRIL

SEQ ID NO: 105141 - protein, 279 aa, Unknown
  Obtained from environmental sample
  DOMAIN (1)...(276): ADP-ribosylglycohydrolase
  misc_feature (1)..(279): Xaa is any amino acid
TDDTQMTLFTAEGLLRAMVRQACSDYEPLLEMMAESYLRWLLTQGIPPSVWIPVNSWLTAQKSLHDCRAPGNTCLGALRNMSMPPKPAGNDSKGCGGVMRMAPVGLIGRSLKWDARRVFNTGCLIALLTHGHISGVLPAGVLSVLILALIDGASLQEGLVTAKALLREKEDFEETMRALELAEDLAKSSMPPPKAIAKLGQGWVGEEALAISVYCALVARSFEQGIILAVNHDGDSDSTGSITGNLLGALYGVKSLPSAWLEPLELREVIEEMAGDLYD

SEQ ID NO: 105142 - protein, 255 aa, Unknown
  Obtained from environmental sample
  misc_feature (1)..(255): Xaa is any amino acid
MLIAAATKAPDDHSLAAKHVWDNFYANHQKKGRFKGLKVLDPFMGGGTTLVEGSRLGMEMRGNDLNPVAWFVVKQELAKVDLDQVRALLADIEAEVKPQIMPYYCCDGPNGEKGVWTHLPTNRQMPPDFDPLAIPRDKRKEYSYEGPEIIYTFWAKHGPCQVTGCGHRTPIMKSHVMAIKSLSVKYWDQQCPNPSCGCDFHIEDTPVRMAPDVPLFVAPDEVPFAVLDANGTPCPKCGHKSPGPGGKAKRKAVGL

SEQ ID NO: 105143 - protein, 268 aa, Unknown
  Obtained from environmental sample
  misc_feature (1)..(268): Xaa is any amino acid
RVHAQGLEVVANRAREDDPDAFYKRLLTTCWREINRSLKPGGLLAFTFHHSEDAPWVSVLESIFNAGFYLVATYPIRSDQSFGEGQFGSRKIEFDIMHVCRKRTEETAPVSWQKLRAQILSDVAQLKTILENHASDGLPAADLKVIQRGKALEYYSRHYGKVMLDHETTMDVETALASINQILNEDKDEGRLRPPWGVEELTWHFLNTFGNANQLDRDQVQKFLKGTGIAPDAFEKSGWCIVQNKVFTRVSPLDFAKNWVGKQKKGLT

SEQ ID NO: 105144 - protein, 236 aa, Unknown
  Obtained from environmental sample
  misc_feature (1)..(236): Xaa is any amino acid
MRRRGRAIGGPSDLMWLVLTHLSQGQTLANMSALSEASGLGRLSDVAFMKRLINCDGWFEWILERLGPASVAGYLKPKGLDKYRVLAVDASVVRSGVSKFGRSWRLHFALDIFSLASHEFRVTDDKTGETLANFRAAEGDLFLGDRGYASKRGMSHCLSGGADFILRLRHEAFAMHSESGERLDLLKLLAQAETGEAVCMPATVDLGGQGLGARRVRVCALKKSGKDMEKTLKWMN

SEQ ID NO: 105145 - protein, 218 aa, Unknown
  Obtained from environmental sample
  misc_feature (1)..(218): Xaa is any amino acid
MRRRGRAIGGPSDLMWLVLTHLSQGQTLANMSALSEASGLGRLSDVAFMKRLINCDGWFEWILERLGPASVAGYLKPKGLDNYRVLAVDASVVRSGVSKFGRSWRLHFAIDIFSLASHEFRVTDDKTGETLANFRAAEGDLFLGDRGYASKRGMSHCLSGGADFILRLRHEAFAMHSESGERLDLLKLLAQAETGEAVCIPATVDLGGHGLGARRVRV

SEQ ID NO: 105146 - protein, 254 aa, Unknown
  Obtained from environmental sample
  DOMAIN (74)...(253): Peptidase family U32
  misc_feature (1)..(254): Xaa is any amino acid
MPVELLAPAGSPEALDAAIGEGADAVYLGLKNFNARMRSQNFTYPRFEAALRSLRRMGKKTYITVNTVFEQREADRMYQLLKYLSSLGPDALIVQDFGVLAMANSEFPKLKLHASTQMNIASSRGANALSRYGVSRVVLARELCLEELRSIRADTNVEMEVFVHGALCVSASGLCLFSSYLGGKSANRGMCTQACRRLYNHGEEGGYYFSPSDLQLLEQLPELAAIGINAIKIEGRMKSADYVGTVTSAYRLVL

SEQ ID NO: 105147 - protein, 127 aa, Unknown
  Obtained from environmental sample
  DOMAIN (1)...(127): Competence-damaged protein
  misc_feature (1)..(127): Xaa is any amino acid
VAESCTGGMLGAYLTRLPGASRWFAGGIVAYDNRVKTEVLGIDPELLREHGAVSERTALHMALGVCRLLHVQAAVAVTGIAGPDGGSPEKPVGLVRIGCALQGVAQAWSFRFKGSRTQVRRAACAEA

SEQ ID NO: 105148 - protein, 73 aa, Unknown
  Obtained from environmental sample
  misc_feature (1)..(73): Xaa is any amino acid
LQRYCHIQDIPTWKHSLSQNQHSWIQAHVNAYGYFGGVTRILVPDNLKTGITTHTRHETVVNKTYQEMAEHAD

SEQ ID NO: 105149 - protein, 260 aa, Unknown
  Obtained from environmental sample
  misc_feature (1)..(260): Xaa is any amino acid
VWNGEEEKALGAIKAGILQTQIEQRMRSLVNEMESDTCLEAVTGAGGGVWGAAGTTPFQGDDLEDIAELVRIHNEIGSPQSERQLVVNTRAAAKLRNKGVLFRVNEAGTAELLRQGIIGRLEGFDIRESGGFRRFNPTGSGYRVNGAFPVDSDDIIIDTGSGAIKKGSIVTFGSDPTKYIVAEDFDGSAGHLKLAFGLTTALTTGTAMTIGSAYLPNVALTRDAVVFAARTPYMPEGGDEALDVTEISDTVSGLSFQVAY

SEQ ID NO: 105150 - protein, 271 aa, Unknown
  Obtained from environmental sample
  DOMAIN (11)...(179): Amidohydrolase family
  misc_feature (1)..(271): Xaa is any amino acid
EELLRKPQAVGLAEVMVEPILAKSGESEAMLKLAAELGKTAEGHAPELYGAALNAYSGAGVRSDHESTNRAEALEKARHGIRVLMREGSAAADLLPCLDIITKDHVDPRYCSMVSDDIDMLHIFEKGHLDHKVRMAVSNGVDPVTAVQMITINPAESLKVDGTRGSITPGKAADIVLLSSLEQCTVESVIAKGEIVVEQRKTVFNKPSFNYAACMLNTVHLKKPLAAADMVIPFSGASKAKVHLIGAKGTTLLTDRLEAELPVVNGFIAVD

SEQ ID NO: 105151 - protein, 284 aa, Unknown
  Obtained from environmental sample
  misc_feature (1)..(284): Xaa is any amino acid
TCPACGKRVSAEYPPEAAAAQQYGSNLKAFIVLLSETGMVAMNRVVEILEAVTGMRISGGTVANTIEQCAKNLEEPVKSIKEEIKGAKAWHFDETGMRSQGGLKWLHTASTGRLTYIEMNRKRGKEAMDDIGILNDFKGTAVHDCLASYWNYDCVHSLCNAHLLRELAFIEETTGERWAQEMIVLLLEIKKAVDMGRADKKTFLPEEELSNYIQRYNMLVEEGLNKNPEQAKPAGRRGRAKQTKSRLLLLRLEKRKDEYLGFANDFNTPFDNNQAERDLRMAKV

SEQ ID NO: 105152 - protein, 285 aa, Unknown
  Obtained from environmental sample
  misc_feature (1)..(285): Xaa is any amino acid
MVALSSTKDYAKAFTVLKQGQWSKKIFTDIAMGDGKTYEVFFKVKLIKLTPDGEEISMAFSCLTPTKDMPFTTHPDLFEKIARRGEGCIHRAGGMFLYNRGSIDLDTYVEMSADLSDFLGDAVEVLLPANDWKVFAMHSHPCDWLYHALITDMNSSDPKKSQTAWDAHRKIYSQEDRLIGRIMAVCDKDTLITVVSDHGAVPDGPTFDPYVPLTAAGLCVTREARDDELVKGEMAEYARRVLNVMPKVPDFSKSACCPQRETYVYINLKGRDPEGIVDSKDYEET

SEQ ID NO: 105153 - protein, 65 aa, Unknown
  Obtained from environmental sample
  misc_feature (1)..(65): Xaa is any amino acid
IHDNDRRLGLVVDRLLERQEIVIKPLGKYLGDIKGISGATIMGDGSVILIMDPHELYVMATSKTM

SEQ ID NO: 105154 - protein, 115 aa, Unknown
  Obtained from environmental sample
  misc_feature (1)..(115): Xaa is any amino acid
VFCGIIGHIYPIQLNFHGGKGLAIFIGASLYIGLFNPENYLSYLNILVVARAHMKKKVPYVIKFADWAEQHGVALEFIQPGKPMQNSYVERFNRTFREEVLDFYVFNRLSEVRDI

SEQ ID NO: 105155 - protein, 232 aa, Unknown
  Obtained from environmental sample
  DOMAIN (189)...(224): UvrB/uvrC motif
  misc_feature (1)..(232): Xaa is any amino acid
AHDAPRLPGVYLWKDGEGQIIYIGKAKHLRDRLNSYFSTKDLKTAALVRRARSIETIIVANEYEALLLENTLIKQHTPKYNINLKDGKSYPVIRITAEEFPRIFRTRRIIEDKSLYYGPFPDLQKVDAMMEMIDKLFPLRKCRTFKSRTGPCMYYHIQRCKAPCCGKIDAQEYRSHVEPVQRLLSGETGPLIIDFTERMHEAAKELRFEWAAMLRNAIQAIEDIAGENSSVV

SEQ ID NO: 105156 - protein, 52 aa, Unknown
  Obtained from environmental sample
  misc_feature (1)..(52): Xaa is any amino acid
MLKVYAFNKGGIKCYEKIGFKQIGKRREALHRNLEKHDIIYMDILPNEFYEK

SEQ ID NO: 105157 - protein, 291 aa, Unknown
  Obtained from environmental sample
  DOMAIN (59)...(291): Caspase domain
  misc_feature (1)..(291): Xaa is any amino acid
ASITVTGNQKTLNFTLPVNLDPGDNRIEVVAFNGYSENRRYVDVIWNAPVGNKPTLPDLYILAIGVNKYDNPGAQLGNLRNLDYCVADARGIIESLKAQEGIRYGKVNSLLIADNAEIQPTAENIRKNLGFLEQAGPKDVALLFLAGHGVSAAEGKFYFLPRDAVIASGGNVNTSRAISGDEIVAVLDAPGNRLVFIDACKSGGVDNDRMVRLFMDTNAFVFAACRGNESSLELPNLGHGVFTYSVMDALKGAVGARSADNVSVKSMSGFVSIDVPERTGNRQHPSAYSLG

SEQ ID NO: 105158 - protein, 120 aa, Unknown
  Obtained from environmental sample
  DOMAIN (1)...(94): Thiamine monophosphate synthase/TENI
  misc_feature (1)..(120): Xaa is any amino acid
AQIAGKSAIIGGTANTELQALQLVKEACDYIGLGPWKPTGTKENLSEILGEAGIKKVLGLHLKIPVIVIGGITASDVPKILSLGVHGIAISSGIVAAKNIKAAFKEYLEQTVLSPAKNIT

SEQ ID NO: 105159 - protein, 268 aa, Unknown
  Obtained from environmental sample
  misc_feature (1)..(268): Xaa is any amino acid
TENAQYSGAVTWSPAVASATRTVKIDMYDSGNDGWDHNGALRINVNGTNLPTDARLASGSSGTYTFSVTASDVVQFYWTGNTGNYHSEDSFIVYYEDTPPSPAFTSSNNNSWNGQNALLVKLRGSLSNSNLNQLLGSFTASGSGGTFAASTAYTATITLTAKTGYTLQGVTSNFFTVAGAAATNDANSGVITAVFPTTVPPVNIAAIQGVTAPVIGGTPVTAITENAQYSGAVTWLPAATRTVKIDMYDYYGDGWNGNGALRIVKNGT

SEQ ID NO: 105160 - protein, 260 aa, Unknown
  Obtained from environmental sample
  misc_feature (1)..(260): Xaa is any amino acid
MESSDFGISGDFGFDSFDNGMIQDVEETGYETFDEPADVIDEAGGSFEKNAQEDIPTQLLMKIADELSSIRTELTTLKKEFTGIRAEGGSSEAEKHKSGFFSEDDDGRVALTGDEMENIFSSADLSSEETLPFDPLREEDEAALKRLSEQNEAINNLSEQDEAPSSEEDAAPEEIDFDFDDLGINLDSDDDTGEQPIEASGALDDFPTLDDTDELQDLREEGITPNEDQADINLAPLDESDLSFNFNDLSTSSSDIQTTD

SEQ ID NO: 105161 - protein, 211 aa, Unknown
  Obtained from environmental sample
  DOMAIN (103)...(208): CAAX amino terminal protease family
  misc_feature (1)..(211): Xaa is any amino acid
MFIPLISAILVKAIHKEPIMSDFLISFKINRWFFIAWLIFPVIVFCSLGISILFPNVTYNPELTGLFDRMKEALTPEQIEEFKAKINSLPINFIWLSLIQGLIAGATVNTVAAFGEETGWRGFLLKNLKDMRFFKAALIIGFIWGIWHAPLILMGHNYPQHPQIGVLMMIVFCILLTPILQYLTIKSKSVIASAIAHGTLNAGCRSFNNGC

SEQ ID NO: 105162 - protein, 276 aa, Unknown
  Obtained from environmental sample
  misc_feature (1)..(276): Xaa is any amino acid
FGTYNLVEMQHRFTVSGFQSVEREFFDILGAYRLSETDNDPGSDDFGDPRQLMGVGAYLNHARNELNAIIYNLNYQGRYSTTKQYWQWGAKFQREDILDYLNEWKMVDSMDYTLPNPPLDNIGGLNPSHPPLLQNVYKSEQHLMSNRYQVFLQNNLELSSELALVAGIRLSYWDFNKEFLLSPRASLTYVPKKLNDWAFRLATGVYYQPPFYRELRDLDGVLNPNIKSQRSIHAVCGADYYLKLWGRPFKLSSEAYYKALNNLIPYEIDNVRVRYL

SEQ ID NO: 105163 - protein, 124 aa, Unknown
  Obtained from environmental sample
  misc_feature (1)..(124): Xaa is any amino acid
MATAGILPSALIPSEDQAIKTQVRTIIGNERLPFPKAQRIYNWLISNVKVQAAPLADSVLEAGALQAGALQALEEQIADSFSASLLFCALARAAEIPAQPVAGVIVDRWGNTEKHYWAEFWLDG

SEQ ID NO: 105164 - protein, 124 aa, Unknown
  Obtained from environmental sample
  misc_feature (1)..(124): Xaa is any amino acid
NDRYRFFSPKDPWYTQRLAATADLIAAARAGTETNGKHTPVVEVNTGGMTRDYCSEPYPSLDILRLLKERDIPLVLNADAHSVDQLGGGYEKAMEIMAQAGYSAMVLFEGRKEGKALWTPHTIP

SEQ ID NO: 105165 - protein, 274 aa, Unknown
  Obtained from environmental sample
  DOMAIN (1)...(274): GcpE protein
  misc_feature (1)..(274): Xaa is any amino acid
MCNTPARDVDGTLAQIERLTAAGCAIVRLAVPDMEAVGAFRAIRGQTAVPLVADVHFDYRIAVAAIESGADKVRINPGNIGGADRVKVVIDAARGAGVPIRIGVNSGSLEKHLLEKHGAPTPAALSESALSWVSFFEDEGFGDIIVSIKSSGVLTAIAACREFAARCDVPQHIGITEAGTVRSGAVRSAVGLGALLLEGIGDTLRVSLSGDPVQEIYVAKEILKTLGLMGGPTVIACPTCGRTQVDVSGVARKVEEMAAGMTEDMKIAVMGCVV

SEQ ID NO: 105166 - protein, 224 aa, Unknown
  Obtained from environmental sample
  DOMAIN (23)...(224): Glycoprotease family
  misc_feature (1)..(224): Xaa is any amino acid
MNILGIETSCDECAAAVVEDGKKVLSNIIATQIPFHKPFNGVVPEIASRKHTEWIYDVVKEALDKAKLAPADIDAVAVTNRPGLLGSLIVGLSFAKAFAWARNIPLIAVDHMLAHLYASQLATDTPYSNQTLAYPFLGLLVSGGHSIICRADAFDDITVLGATIDDAAGEAFDKVAKHYNFGYPGGLAIDRMAQNGDSGAFRFPLPSLHKGPHRCDVSYSGLKT

SEQ ID NO: 105167 - protein, 290 aa, Unknown
  Obtained from environmental sample
  DOMAIN (76)...(141): His Kinase A (phosphoacceptor) domain
  misc_feature (1)..(290): Xaa is any amino acid
KGMAAYFTDMNVRVLREQKTLAVQEWATSHEGVKMFLDVIKMPIYQGGTLTGLVGIARDITAHKAAETRAVEASKVKSQFIANVSHEIRTPLNAIIGMSELLSLESLHSRQRNYVKDISIASHSLLSIINDILDFSKIEAGKLELNPINYDFQEMMANLVSMFKFMARKKSLNFEYDEGEGGLPKCICGDDVRLRQVLVNLCANAVNFTNSGYVRLRVAAEDAKLIFEITDTGIGIKPDDLKNLFSLFMRADSIKNRDMIGTGLGLSISKTFVEMMGGTIEVESEWGSGT

SEQ ID NO: 105168 - protein, 237 aa, Unknown
  Obtained from environmental sample
  misc_feature (1)..(237): Xaa is any amino acid
IFVWGHGGGDDDSSSSVTGDGDNSSSSVSYTEKGNDIANYRTVPIGEQVWMAENLDYDVEGSECYRNNPANCVTYGRLYSWAAAMDIDTKYNSEKWDGSDVKHQGICPKGWHIPSITDWDRLMRYVDGTSGTEIAYYSETAGRYLKATSGWNRSASFSDVGGNGEDTYDFSALPGGSFEDDDGRFYDVGNLGYWWSSSEYNDNIIRAYSRFMSSEDDGGNSARRVKSNLQSVRCVQD

SEQ ID NO: 105169 - protein, 94 aa, Unknown
  Obtained from environmental sample
  misc_feature (1)..(94): Xaa is any amino acid
AHPQVEAITSWSGTDDSWLHAPAGFLRTDNSEKPAFKALRAKIENEWRTEITAHSDANGFVQLEGFKGTYEVSCMGKTAAFELDKDTSIEIKLN

SEQ ID NO: 105170 - protein, 76 aa, Unknown
  Obtained from environmental sample
  misc_feature (1)..(76): Xaa is any amino acid
MLRSIFLSALLTALSLQNVFAAEAKGAFNAEQYKKALWMVTRFYGAQRSGIGPNWLLMDHTYKTSFVKDADGNRNL

SEQ ID NO: 105171 - protein, 270 aa, Unknown
  Obtained from environmental sample
  DOMAIN (1)...(88): CHC2 zinc finger
  misc_feature (1)..(270): Xaa is any amino acid
DATDIVELVSQAVKLRKQGGAWVGLCPFHSERTPSFSVIPDRGYYHCFGCGKNGDVFAWLMEREGMTFREAMEQLAKAAGIELPRFRADGDRAKDELEARMRSALDLAQTYYQDCLVENRRASDYLSGRGITPDFARRAGLGFAPDGWENVVGLLRRDGLSPELIEQTGLAARSSKGNLIDFMRNRLTIPIRDQRGRLVAFGGRAFGDDKPKYLNTRETRLFKKSEMLFGLDMAKGQMRDGALLVEGYFDVLMLQQGGINHAVAPLGTAL

SEQ ID NO: 105172 - protein, 257 aa, Unknown
  Obtained from environmental sample
  DOMAIN (186)...(225): WD domain, G-beta repeat
  misc_feature (1)..(257): Xaa is any amino acid
VLSGSGDRTVKLWDAGTGKELRTFSGHTSYVNSVAFSPDGRQVLSGSGDRTVKLWDAGTGREIRTFSGHTSYVNSVAFSPDGRQVLSGSGDRTVKLWDAGTGREIRTFSGHTDSVRSVAFSPDGRQVLSGSLDDTIKLWDASTGRELRTFSGHTNTVLSVAFSPDGRQVLSGSSDDTIKLWDASTGREIRTFSVNIIHSISSVAFSPDGNQILSGSNDNTMKLWETNTGRELRTFSGHTDRVYSELTSDGVKDVAFS

SEQ ID NO: 105173 - protein, 264 aa, Unknown
  Obtained from environmental sample
  DOMAIN (1)...(264): Alkaline phosphatase
  misc_feature (1)..(264): Xaa is any amino acid
LATTYDAGTFITDSASAATAIASGNKTLSGVLNMDAGKTKEFRPITEYVREAGMKVGIVSSVTLNHATPASFYAKAPSRSNYYDIAVQLAKSDFDYFGGGSILQRAGKNNDQQDAVELAKANGFTYVDTKDGFNALKPGGGKVIAVSPRLQDDGAMQYEIDRKPDELSLADFTKKGIELLDNPKGFFMMIEGGKVDWACHANDAGAVINDVLALDAAVRAALDFAAQHPKETLIVVTGDHETGGMAIGFAGNQYNTFFDKVALQ

SEQ ID NO: 105174 - protein, 265 aa, Unknown
  Obtained from environmental sample
  DOMAIN (1)...(58): His Kinase A (phosphoacceptor) domain
  misc_feature (1)..(265): Xaa is any amino acid
MSHEIRTPLNAIMGMGELALYTDVMPKIHEYLKGIKQAGQNLLLLIDDILDFSKIETGNLQINQAPYYLASLLDDIINIIQIRIGEKPILFTANIEPNLPARLLGDEARVRQILFNLLSNAVKFTNQGTIELKISAGYRAEEKADLPIVITVTDTGIGIKEEDMGSLFKSFTRLDMTVNKSIEGSGLGLSITRSVCQAMGGSVTASSEYGKGSVFTAVVPQGRVDIDRLAAVDNPKVKVVLIYDHHPEYLKSLTETLRNLGVIVV

SEQ ID NO: 105175 - protein, 144 aa, Unknown
  Obtained from environmental sample
  misc_feature (1)..(144): Xaa is any amino acid
MSAFIHFGMNTFTNKEWGSGKESPSDFKLDPASLDTDQWVRVIKGAGFGRVIFVAKHHDGFCNWFTDLTKHCVQNAAPDNQVDVLERLSKSCTAANLNMGVYLSPWDVNSPHYGLNDPATTEIDPWRYNNYYIGQLREILDPSV

SEQ ID NO: 105176 - protein, 277 aa, Unknown
  Obtained from environmental sample
  misc_feature (1)..(277): Xaa is any amino acid
SPTTKTVTVPATKIDALPASPTRTGYTFNGWNTQANGSGTAFIQSTIVSASINVYAQWKSSNANIRAVSSGASGNANAPLGTFGLYIGGIPATSNGTPSTTNVITGTGTGAPTNGTIGGNGTSDAANSPIVVIVEDAAVSKVEFGRNGATSDTTDPTWQTLTRTNDADTPTTLTDKRWVGKLAEKNDTNNWRFWVRITAEDGTATNIYRYTHNVGTTAGYGTLSSLSIDKVTATLGIGSGWWNTTVAPNLAVGNATIVTGNNVLAAWNIGSTNTSYN

SEQ ID NO: 105177 - protein, 268 aa, Unknown
  Obtained from environmental sample
  misc_feature (1)..(268): Xaa is any amino acid
TSIISLADASGGDGNYSYLWLCDDMPVAITDNSTCIPTQEGTYTRQARDFYCSLDWETSAGTLVVEASPALSQDDPYDVTICYNSTHFFILYGAWGGDGANYHYTWQQSSDNSTWTPAAGTNDEEDYITGSLTANMYYRRVAVSCDVSATSTAALVTVLPNVTQDNPIGAAICHNTTYTLVLDAANGGDGDYTYAWQQSSDNSTWIAATGVNDEENYTTASLTSNMYYRRVATSCGNSATSTAAKIAMFADIMQSDPSDAVFCHGLTH

SEQ ID NO: 105178 - protein, 245 aa, Unknown
  Obtained from environmental sample
  DOMAIN (97)...(240): tRNA synthetases class I (E and Q), anti-codon binding domain
  misc_feature (1)..(245): Xaa is any amino acid
WFIEQLEIFPSHQYEFARLNLTYTVMSKRKLLELVKTNAVTGWDDPRMPTICGMRRRGYTPESIRMFAEKVGVAKRDNTIDLSLLEWCVREDLNKRANRYMAVLNPVKVVITNYPEGQVEMMHAVNNPEDESAGKREVPFSRELYIEHDDFMENPPKKYFRLSPGNEVRLKYAYIIKCEEVIKDEQGNVKELRCTYDPETRSGSGSTRQVKGTIHWVSAAQAVPAEVRLFDRLFTEPHMDHIPDD

SEQ ID NO: 105179 - protein, 229 aa, Unknown
  Obtained from environmental sample
  misc_feature (1)..(229): Xaa is any amino acid
MEVILLDDVINWDELPIGCVRALWHPYILSGAVNLLQGDSTAGKSYLSQAVIAALTTGSALPNAEPQPPCNVIIQNAENSFTDVIKPRLIELGADLSRIKSISEEQERLSLLSPKIEEVITRYDAKLMSVDPIQAYMNMYKLESVRETLISLGQVAARTGCAILCIGHLTKSQTKSQYRGLGSIDIYNAIPSVLNLGKVDDDVRVMVHNKSNFFEVGVPIAFTLNGGFR

SEQ ID NO: 105180 - protein, 279 aa, Unknown
  Obtained from environmental sample
  DOMAIN (7)...(251): tRNA synthetases class II (D, K and N)
  misc_feature (1)..(279): Xaa is any amino acid
LGVSSLAESGGIIKGFNAKGGAKFSRKDIEEEFTKYAAVFGAKGLAWMKVSEAGLESNIVKFFSEKQQAELKKRMGAEPGDLLLFVADTPKVTNDALANLRVKLGQRLDLIDPEKMNLLWVVDFPLFEYNPDEKRWDSVHHPFTAPKAEDIPFLDSDLGRVRSDSYDVVLNGVELGGGSIRIHDSGLQAKIFKLMGITPEDAEVKFGFLLEALKFGAPPHGGLAIGFDRLVMLLQGCASLREVIAFPKTQKGSCPMSEAPSAVTDDQLTELYLRTAAIP

SEQ ID NO: 105181 - protein, 263 aa, Unknown
  Obtained from environmental sample
  DOMAIN (2)...(145): Domain of unknown function (DUF323)
  misc_feature (1)..(263): Xaa is any amino acid
NIGYLRLPTEAEWEYAARGGSRVPPDALRQQEFYTLEPGASLEDYAVFRPENAARILDAPQRIGSRRPNPLGLYDMAGNVAEIMLETFHFSLGNRLHGSAGGVVRKGGGFNASKDEILPGRREEVPLLHARGLTLTRDTGARFVLSGINTPDGGRSETLKKEWASLGERSEQIVPGANPLQELDRILGLPLDATAKANLTALRGVIKDFNVTLEREQSATAEGLMRTAVYMMETIRNYAVRLNIAKGQIKEHEELAKKEGGAV

SEQ ID NO: 105182 - protein, 120 aa, Unknown
  Obtained from environmental sample
  misc_feature (1)..(120): Xaa is any amino acid
SAASKLPVEIQKSIEEGKVSSGHARALLSITDAAEREKLFREILAGDVSVREAEKRASPSPATKVKKVKQQPPEIEDMVEKFIQKLGTKVVIEGGINKGRILIDYYSMEDLERLFEILGA

SEQ ID NO: 105183 - protein, 52 aa, Unknown
  Obtained from environmental sample
  misc_feature (1)..(52): Xaa is any amino acid
MVGQGFTMVEVLSPCPTNWDLDPIAAVEWLEKNMIPVFPLGEIKNTLKADCH

SEQ ID NO: 105184 - protein, 170 aa, Unknown
  Obtained from environmental sample
  misc_feature (1)..(170): Xaa is any amino acid
LKTAIIYGIEHKGNTYNTVQLFKNNLNLNENDTVEYFLPNDMPYFCIGCKNCFMKGEEFCPYQKYVTPIKETILNAELIILASPVYLFHATGQMKTLLDHFGFLFMNHRPNKLMFSKKAIVVSIAAGVGMKSAIKDMSGSLEYWGISRIYKFGFAVNASNWDEIAEKNKQ

SEQ ID NO: 105185 - protein, 276 aa, Unknown
  Obtained from environmental sample
  DOMAIN (126)...(276): ABC transporter
  misc_feature (1)..(276): Xaa is any amino acid
VLHRPVDRIVVLEKGQIISDSKPEELLAKDILRKTGIREPLYISALSYAGVKVDTEMASRLLGSLKINSRPLEDWDKNLAARQTAPRLQYINAVESSGLEVNNLHFRYTEQGEPALKGISFSVEPGECIGLVGKNGSGKSTTAKCICGFVRPDSGTISFNGKDLAELSIMERAEKIGYVMQNPNQMISFPMIYDETAFGLRTRGIAEKEIKDRVHEALQVCGLYPFRNWPVNVLSYGQKKRLTIASILVMRSSFLILDEPTAGQDYRHYTEFMEFL

SEQ ID NO: 105186 - protein, 107 aa, Unknown
  Obtained from environmental sample
  misc_feature (1)..(107): Xaa is any amino acid
AELVIDEIKGASQPLQDEMLEKVSSFTLLPFTDDMHDLAKDYIENEIFPEKYLADALHTAFASTNQISILLIWNFTHLVKIKTRRMVALINAMHNYNPVEIIAPPEL

SEQ ID NO: 105187 - protein, 126 aa, Unknown
  Obtained from environmental sample
  DOMAIN (1)...(102): Nitroreductase family
  misc_feature (1)..(126): Xaa is any amino acid
ARNRQSWHFTVVQNADLAKQIISNVTNGNVLIVVSAPGDGKTNNTEILDAALATQSIYLAAQAIGLGSRIYTGPVDMVNKNLKAVLGLPSGYSAVAVVRIGKIEQVDAVSAASSRKKVSDVVNYKK

SEQ ID NO: 105188 - protein, 136 aa, Unknown
  Obtained from environmental sample
  DOMAIN (27)...(136): Bacterial flagellin N-terminus
  misc_feature (1)..(136): Xaa is any amino acid
MIINHNLSAMFADRSLKVTDVNLTKGMEKLSSGIRINRAGDDASGLAVSEKLRSQIRGLNQASTNASNGISFIQVTEGYLQETQDIVQRIRELAVQAANGIYTAEDRLYIQIEVSALVDEIDRIASHAQFNGMNLL

SEQ ID NO: 105189 - protein, 274 aa, Unknown
  Obtained from environmental sample
  misc_feature (1)..(274): Xaa is any amino acid
TNPRLIIEDSTAAWSSLEDVKQYSLDGGLSWEVYPAAKTGWTTLNGSNLTINSGEWDLRVRYLDRAGNEGAQRSQKIHVNSNFPKLVSVSAEQPNGWYTSNAGNNSLTFNLNFADAVRVATAANVTITVTNRAASNTNTPGGTNPTYQMQVPVATGQTEIDRAGSSTVKFTWNNISGKEMRDGLYISAITVTGLMDRFSNPGVNSTSAPWNGNITINGDTCTNLPWTATASIKVDAIAPTATYTPANAGVLTAADKKTITLTFNEPVMIGTGKI

SEQ ID NO: 105190 - protein, 245 aa, Unknown
  Obtained from environmental sample
  DOMAIN (1)...(245): Pyridoxal-phosphate dependent enzyme
  misc_feature (1)..(245): Xaa is any amino acid
RVKRISADLNGVSVFAKAEYFNPSGSVKDRAARAMLLHGISTGQLKKGKTILDSTSGNTGIAYAMFGAALGYEVELFMPSNASAERKKIIKAYGAKVVETDPLEGSDGAYRAVIERAVGDPEKFFFPNQYDNFENARAHYETTGVELYKQCKPTHFVAGTGTSGTFMGTSKRLKEYDPSIHITLMQPNSPFHGLEGMKHMGATIKPKIFDESVADSRVEIGTEEAYKTARRLAAEEGIFVGVSSG

SEQ ID NO: 105191 - protein, 267 aa, Unknown
  Obtained from environmental sample
  DOMAIN (191)...(267): MutS family domain IV
  misc_feature (1)..(267): Xaa is any amino acid
DTARSLIPHVRFLKVYGDCEFVGLDESTQRNLELVANLTDGESRFSLLEVMDETKTAMGRRLLKSRILHPLRNIDLINRRLEMVEKLYHSQEKLNRLRDLLSKTPDLQRLCSRLAMDKAHGKDMTALKNALLYFGQIEEELRGEIFCYESSEAQLNEDEFKKLEALKEQLEKSIADDPSVLLSEANLIRSGYNAELDRLKELENSGRNLLEEYLEEERKETGIPGLKIKYNRLIGYFLEVTNVNLSKVPSRFIRRQGIAGGERYTTD

SEQ ID NO: 105192 - protein, 273 aa, Unknown
  Obtained from environmental sample
  misc_feature (1)..(273): Xaa is any amino acid
TQRWIFGLPLSGNFDLTVQHMARKGAMQNFPPYFNGDEPFAYPDGFSSYQEYEDAYKVPPAQYQMPYDQWRISLGAGTGYRWLTPYGNLGLGGGFRVGMVLNKYNADLYRPFDPILREENNNWSPSLSIWGSLSLDNRDIYYDPSTGYYAIQRLGYYGILPFEKEHYIRTDTKFEWFHTLLNLPVADNWSLKAVFGVHTGLSFIFPQLLYDKPFIEEANSLAVDGMFTGRGWMTEYRRTGYALWENWAEIRIPLAPGIIAWDFFFDAAGVKKT

SEQ ID NO: 105193 - protein, 276 aa, Unknown
  Obtained from environmental sample
  DOMAIN (1)...(276): Hsp90 protein
  misc_feature (1)..(276): Xaa is any amino acid
YLTYDEQEYDDKGKEKGSKTKCDRINSGTALWRRSKSELKDEDYKEFYKSLGHDSDDPLFYVHTKAEGTLEYSTLFYVPKKAPFDLYHVDYHPGVKLYVKRVFITDDDKELMPTWLRFIRGVIDSEDLPLNVSREILQQNKILLNIKNASVKKLLSEFKSLADKTAAGDEEAKKSWETFVSQFNRPLKEGLYQDYANREAIQDLVRFKSSSVEGWTSFADYVSRMKSDQKNIYYITGGDEKTLKASPLLEAYTAKGIEVLIMDDEIDDLVIPTLHS

SEQ ID NO: 105194 - protein, 70 aa, Unknown
  Obtained from environmental sample
  DOMAIN (1)...(66): Cold-shock' DNA-binding domain
  misc_feature (1)..(70): Xaa is any amino acid
MQCGTVLFFNDISGTGKIMADNGARIKVSHKALSGDGYKALDEGQRVSFKSVRRKSGLEALVVEIIDTLF

SEQ ID NO: 105195 - protein, 107 aa, Unknown
  Obtained from environmental sample
  misc_feature (1)..(107): Xaa is any amino acid
MRTVFVIGAGANTEIGMPSGNELKIKIASLLKLKPDESGGTVGDEIIRGAFYEYYSDDDGRIFSNLIYQLKDTAMNISKAMPLSISIDNYIEAHKPNEGIAFCGKMA

SEQ ID NO: 105196 - protein, 277 aa, Unknown
  Obtained from environmental sample
  DOMAIN (3)...(180): Galactose-1-phosphate uridyl transferase, N-terminal domain
  misc_feature (1)..(277): Xaa is any amino acid
MSEYRQNVVNGEWVIISSERAKRPADYTSTAKNKTALLEHNPDCPFCTGNEHKCQKSTYEIKDGNSWILRSVPNIFAAVSRPEQISDTLLQRQRVSKIHLQAQGYGAAEVIIESPKHNANLVFMEKSEVYEIIKSYKERFIALSHDPNIAMVNIFKNYGATAGASLEHPHSQIIATHVLSTHITDSLTYARRAFNTYGTCIFCDLIKRELEAGDRVVMVSKHFIAFCPFAARYPYEVRICPLKHSALFGTISTEEMEDLASVLQLILKKIYILLKDP

SEQ ID NO: 105197 - protein, 153 aa, Unknown
  Obtained from environmental sample
  DOMAIN (4)...(152): MraW methylase family
  misc_feature (1)..(153): Xaa is any amino acid
MSAGVYHIPVLLNECVESLCIRHGYDYADCTLGGGGHSEKIAELLGEGQKLHCFDRDIEALVAARARLARFGEKIIYHHKPFSDLGKELAPEALGGVLYDLGISSHQIDTNRGFSFAGNEALDMRMDSGSGESAQDYLERISEKEWQKFEGKF

SEQ ID NO: 105198 - protein, 280 aa, Unknown
  Obtained from environmental sample
  misc_feature (1)..(280): Xaa is any amino acid
AVSGILAVLAAGITHSFMRDKFNPETVKLNIARDSVWEFLTFTFDGLVFVMLGTQLPSILKTISSGAFSINAFAIVGVVLLLTVIFTILRFLWWLVTIRKNTYQEADNPISAVKAAVIFSLAGARGTVTLASVMSIPLLLDNGAEFPERDLIILLASGIIVISMLITNFILPLFVRRISEKRLSDKEQEAHSEIIQGVILRLKNEATDENRLATELVIRNYAKRNVVERSRNLRYKETQIEKELRTQVFIWMKENTTALIENGTADKTIAEHFLSVIDTH

SEQ ID NO: 105199 - protein, 103 aa, Unknown
  Obtained from environmental sample
  misc_feature (1)..(103): Xaa is any amino acid
VSGMLCAGAMQFADWSAAYRLFGGGRMDSRALFAPILETALGGLPDGAPLVVAMDDTLVRKRGRKVHGASWRRDPLGPPFHTNFVWGQRFLLMSADLPDKSCP

SEQ ID NO: 105200 - protein, 268 aa, Unknown
  Obtained from environmental sample
  misc_feature (1)..(268): Xaa is any amino acid
RKWLIHESMPDDMLGEIQSNTHGNTYSNTKSNTPACGELASVIFRVIDKEGKLRDLPELRQIRQRISRLKSALDTCVSRYLTNEETRHMLQSTLPSQRDGRTVLAVKANFRGRIRGIVHEVSSTGQTVFIEPEDVVEKNNDILVETRNLEAEIKKILLNLTKQISEHSEEIKSFHLTVLKMEVLMAKARYSLETAGYFTPGCFTPGYFTPGYFTPSDGSAFALVQARHPLLENAVPIDLSMGSESTRALIITGPNTGGKTVVLKTVGL

SEQ ID NO: 105201 - protein, 228 aa, Unknown
  Obtained from environmental sample
  misc_feature (1)..(228): Xaa is any amino acid
MTSFVIPNSPRYKALLEEAVGKAFEKKIALEDFGREHHEWLAKNFEHYLKTGEAPTAGLRAIFRRIAEALKDLFSRWTGNPELKRYFDELLAGPETGSRQRAEAESRARVKTDNEQQKAFVEMTTAERVAQSDLYTREEKAAMLFAIAEQMARDVSEEPEETRNTPSKAWPEGFPNVIRFISKDEKHSRPWVLLANHPDYKLAKEHADRPAAVRLVRDFSKGKSSGGR

SEQ ID NO: 105202 - protein, 126 aa, Unknown
  Obtained from environmental sample
  DOMAIN (1)...(70): ATP cone domain
  misc_feature (1)..(126): Xaa is any amino acid
MAAACQKRPVRYALLEELAGDIHAKLLEQPDREVGSLLVGEMAMEGLKTIDSVAYVRFASVYREFKDLSEFVRSLEALVGTVKKTGPGAFATQAADGADKGDDEPAPSRGGEAEPPTKGPPGPAQA

SEQ ID NO: 105203 - protein, 280 aa, Unknown
  Obtained from environmental sample
  misc_feature (1)..(280): Xaa is any amino acid
EQGRASAWLILKWLSELYVERVIIENVKEFLSWGPLDAAGKPVKSQKGKTFNAFVASIRSLGYTVDWRVLCAADYGDPTTRERLFIQAVKGRKKIVWPQITHMDGDANLMGYLPWRPARDIIDWSVPGESIFSRKKPLAENTIKRIAAGIEKYWGGFAEPFLAVLYGTNNSHPLDRPLSTITGSGAHHALIEPFLLPNEGYYRGNQPRSIDDPISTITASRGFGALIEPFPLFVDYNGNGSATPVKEPLRTITTKDRFALLEPFVLKHRAYSAGDRVHHL

SEQ ID NO: 105204 - protein, 214 aa, Unknown
  Obtained from environmental sample
  misc_feature (1)..(214): Xaa is any amino acid
VNRKKLYQKKLEKIPKPEFIVLYNGKIKYPDYMELKLSYAFKDIDGLKLSGSSIPLELIVQVYNINYGHNSEILKKCETLDGYSKFIGKIREYQKKKNPLEEAAINAINYCIKNNILKDYLEAHASEVLNMLITEWNQEEYLEVAIEEAREEGLEQGLNEGREQGLEQGREQGMEQGLKQGKQIIAKNLLAEGSTPEFVQRITGLSLEEIERNG

SEQ ID NO: 105205 - protein, 128 aa, Unknown
  Obtained from environmental sample
  misc_feature (1)..(128): Xaa is any amino acid
LAKDINSIENHREREKGVLVYPVYSRRSGGLSVGINLFPDQKCCPFDCPYCEVFPFSTKAVFSLKQMEDELRSVIADAGERNIPVKDICFSGNGEPSLSPDFPKALGLAVRIRRELVPSAKLVLITNG

SEQ ID NO: 105206 - protein, 78 aa, Unknown
  Obtained from environmental sample
  misc_feature (1)..(78): Xaa is any amino acid
LERKGFLTHTTENRTFIYTATESRSTAAARAVKAIADRFCNGSLEQVLAGMVNAQILDRRELQRLADKIAKAKRGDKP

SEQ ID NO: 105207 - protein, 197 aa, Unknown
  Obtained from environmental sample
  misc_feature (1)..(197): Xaa is any amino acid
MLPLIVESAARATVLAGFLWLALRLARVRRPHPQKSAWTAVLLASLAMPCLIRTVTAPVIQAPAYLLTLSPQAGVTAPAHGAWHLLGTLYALVAAAGAGSYLVSLLRMARVRSRAEVLEAGWTRGLDVRVSRRLGSPATFAGTILLPQEFRKWSRQTLDAVIAHERSHVLEHDCHRLWLAHLHARIFWFNPVAWWLL

SEQ ID NO: 105208 - protein, 246 aa, Unknown
  Obtained from environmental sample
  DOMAIN (181)...(246): Anticodon binding domain
  misc_feature (1)..(246): Xaa is any amino acid
VVLLRGCDQINEVKLKNYLGADIVLLAEDSAVEKILGTEPGFCGPVGVKNARIIADALVETIGGGVTGANKKDTHLLNVVPGRDFELKETADLRLAQAGEKCPHCGAPLKAIRGIEVGHIFKLGTKYSEAMQAEFLDSAGTSRPFIMGCYGIGVGRTAAAAIEQNFDENGIVWPKALAPYHCVVIPAAMQDTAHVAAAEKIYRELLDAGVEVLLDDRDERIGVKLKDMELIGITSRVVAGKALSEG

SEQ ID NO: 105209 - protein, 277 aa, Unknown
  Obtained from environmental sample
  misc_feature (1)..(277): Xaa is any amino acid
AVVSIVSGLSQMIKDQLNFLAPDMFMVTRWGMIRSQQEALEAMKRPNLTVNDFTKVRDAGLPSVGAVGAASSANRIAYYGAKKYEGAEIFGATANSNTILNLDLDEGLGRWYTEPEENSTKYVAVIGAGIKEEFFGLQDPIGRTILVAGLPFRVIGVLKKEGESFGGGNSSDSRVYIPFSVFRRNFLRPWSDITITVKAKSLDLMDAAQDEVRAYMRAMRHTPFRAPDPFAILSKDFIMDFIGQITAAIFSFFILITGVSLFVGGIVVMNIMLVSVA

SEQ ID NO: 105210 - protein, 272 aa, Unknown
  Obtained from environmental sample
  DOMAIN (2)...(272): UvrD/REP helicase
  misc_feature (1)..(272): Xaa is any amino acid
MARAKDLFLSPNDPELDFIDHSKNFRSIYAKYEERLAEIGNVDFGDLIKKPVEILRKEPEVAGRLRNRFRVILVDEYQDANTAQSELLKELYSPGAYICVVGDDDQSIYSFRGAEVENILQFQDCFEGADIIRLERNYRSTAPILKTAASVVKYNEGRLGKTLISVRGEGKVPVLAFLPDQDTETEYCAELIQKVAKGGKGASFSEWAVVYRTNAQSLGFETEFLRRKIPYRVVGSLKFYEREEIKDILALLSFMVNPRDEIAFRRVETSRA

SEQ ID NO: 105211 - protein, 188 aa, Unknown
  Obtained from environmental sample
  misc_feature (1)..(188): Xaa is any amino acid
LGILSGTFIYSLASGLSVFATFHVASGLMINKVGDNASMVIFLAVLGALVAIITKAGGSMAYGQWAAKRLKNAKGASLATAFLGILIFIDDYFNCLTVGTVMRPITDRHKISREKLAYLIDATAAPVCIIAPISSWAASVISYYPTQTGITGMQAFVSSIPMNLYALLTIFMIVWMSVRPNSDYGPMA

SEQ ID NO: 105212 - protein, 163 aa, Unknown
  Obtained from environmental sample
  misc_feature (1)..(163): Xaa is any amino acid
MKKTIQVLLCAALLLVLGTGCASCDVSGEEDKAPENPASLAIMTWNAQALFDGTDNGTEYDEYRESAGWTREKYKGRLNIIAAAIGGLERKPDIIALQEIESPVVASDLADALSKHGYNWTYFTNIPGMALGVGLLSRFPFTRTRSHSVYIDGEIAPRPMRKR

SEQ ID NO: 105213 - protein, 229 aa, Unknown
  Obtained from environmental sample
  DOMAIN (41)...(224): CheB methylesterase
  misc_feature (1)..(229): Xaa is any amino acid
APVPQVTQHPDIAVHLNLTSAPSSAPAQPPTQLRKAGKTEIIAIGISTGGPDALRVVFSKLDADLKVPIVVVQHMPAGFTNEFAKSLDRVCPLDVKEAEDGDAIQPGRILIAQGNKHLEVEKKFSSAVARLSDAPQVSGHRPSADVLFASVAMAYTNHALGVIMTGMGRDGAQQLGTIYKEGGMTLGQDEKSAVVYGMPRVAYELGHVMEQVSLENMARRICDVAKTDR

SEQ ID NO: 105214 - protein, 251 aa, Unknown
  Obtained from environmental sample
  misc_feature (1)..(251): Xaa is any amino acid
MESVGNGTAIAELDRAAQGAEVTITAAPNNGYAFEKWEVVSGGVTLPNDKANPAMFTMPGNAVTIKAFFKEIPPDTPHINFQQLPTFDPVTFGYTTQPSAKNVTIINDGSGTANITRIELDDDKAFTLGSTSITLLFVGKIATFTIQPNPNLLAGTHTGTIIVTYDSGEKAQAMVSFKVTLGSGTEADPFLVYDETALRKVGRGNWEHGNWSLSAYYKQMDDITLVEQSNWEPIGKKGSAFFGSYDGGNKT

SEQ ID NO: 105215 - protein, 53 aa, Unknown
  Obtained from environmental sample
  misc_feature (1)..(53): Xaa is any amino acid
MEKIIDLLKKSGAMLEGHFLLSSGRHSDRYFQCAKLLQYPDKAYNALKPVVKK

SEQ ID NO: 105216 - protein, 74 aa, Unknown
  Obtained from environmental sample
  misc_feature (1)..(74): Xaa is any amino acid
SALKEAGMRVPVIGMGGISYTKDALEFLMAGACAVQVGSATFINPHTMINIVEGISKYLTDNKMKNAADISIRN

SEQ ID NO: 105217 - protein, 168 aa, Unknown
  Obtained from environmental sample
  misc_feature (1)..(168): Xaa is any amino acid
HEVLDDLDTFETREYNRLRVTPEVKETLLAIAPYWKGKTLTELFAELRHPIAKEGVVAGLTSNSHEWSGFGHVCLDYRKLLSRGVAGMRDEADRRLRDLAFTDPEYGLKSSFWRACLEVCAGMLIYARRYRDLALELAGREENPDRRLELQRMAAMLDNVPLKPANTF

SEQ ID NO: 105218 - protein, 279 aa, Unknown
  Obtained from environmental sample
  misc_feature (1)..(279): Xaa is any amino acid
DSGSLLEEGIYTGVLSVNYLNGYTATALSPPFNLRTTPPSAKIESEFTAFSPNYGGVQSEMIIKQEGSKEELWTGEIRRANAPASEKAVRSFRFNGIPLKELRWDGHGESGTFAADGEYTYELYAVDQAGNTGRSNTLRFRMSTVDTPVMISSDIRAFSPNGDRVKDTINLNPQIQVKEGIVTYKVEIQDNAGRTIRTFDGRGMPPAAISWDGRTAENAQAPEGMYKARLELRYEQGNQPSAVSLPFELDITPPKGSASAPYTAFSPNGKRATIPFTVK

SEQ ID NO: 105219 - protein, 261 aa, Unknown
  Obtained from environmental sample
  misc_feature (1)..(261): Xaa is any amino acid
MERKITGANEYTRAILDASPVGFTAFDEDANIIDSNDFIVNELGTTKKYYLEHFYEFSPEYQNDGAKSIDKAIEMVKKSLAGEKQVFEWTHCTALGVHIPYEVTLTRTRYNDQYVVMGYQYNLSNTKKMLESIREQGEQLKMRLKQQELISEISRGFISSGDSEMLVKDAVAKLGLFHNVSQVFIFAMDYQRNDSYLAYSWCADGVQPRKAIPNVFKYIKPVFPETLPNADTISVVSCDDTTVSSDAVFQALASVDVMAVI

SEQ ID NO: 105220 - protein, 200 aa, Unknown
  Obtained from environmental sample
  misc_feature (1)..(200): Xaa is any amino acid
SRYPQRNRRELELSLRNYEKKEGLELGSFLILGPATLAAVYDAVKFQKPVIDRYVAIGGSAVKHPQVMKARIGTRIGELIEQCGGFVDKPIRVATGSPLSGRAVMDLDEPVTKNCSSVFAVRKTRIAAHWEQNCINCGECRAVCPLGLDPEDIYKQIITAGIINKDISGCHGCGCCKVVCPSALPLSELILKEKLGVPRA

SEQ ID NO: 105221 - protein, 222 aa, Unknown
  Obtained from environmental sample
  DOMAIN (34)...(216): ABC transporter
  misc_feature (1)..(222): Xaa is any amino acid
MNNGTEAIRISNLYHWYEPGKIILEGINLTIAETEFTAIIGQNGSGKTTLMKNISGLLRPSRGEIFIRGKNTTGTDAAEIAQEAGYIMQDHDNQLFEQTVFDEVAFSLRHTGSKKEITRKVEETLEAVGLMDKKDAFPPALPRADRIKVVFAAVLVMDTGILLLDEPIAGLDSRNCRMIMDIIAGLHQKGKTILLITHNIGVAARYAQRIIVMKNARMTWTE

SEQ ID NO: 105222 - protein, 156 aa, Unknown
  Obtained from environmental sample
  misc_feature (1)..(156): Xaa is any amino acid
NSGVITAVFSSSATAVINTAAIQGVPLPVTGGIPVTSITENEQYSGAVTWSPTVSGTFAASTQYTAVITLTPKIGYSLQGVSANFFTVAGATSVRNNANSGVITAVFPSTPANDDFNISGTGTFIYDRNTKVVTITPKAGKSTGAVTVKYNGNTVA

SEQ ID NO: 105223 - protein, 234 aa, Unknown
  Obtained from environmental sample
  DOMAIN (1)...(224): NOL1/NOP2/sun family
  misc_feature (1)..(234): Xaa is any amino acid
ASVSYSEGLTKSYMLDRASVLAALSLTLPASGTVLDACAAPGGKSLVLASRMTVETQLLCNELSAERRRRLKNTLKEHLDGDKLRQVSVSGFDAAALGGRKSEWNRFDAIMLDAPCSSERHVIQSPKALAEWTPARPRFLSRRQWSLLSAAFLLLKPGGSLVYATCALSPEENDGPVSRLMEKYARAVELDELNLAEGEKTKYGRLILPDVSSGMGPMYVARFRKRHSGKDRLE

SEQ ID NO: 105224 - protein, 259 aa, Unknown
  Obtained from environmental sample
  misc_feature (1)..(259): Xaa is any amino acid
MTRGEIFSARVERIAAGGAGVASFQGKRVFIELTAPLDLVRCQIKKDHKSWAEAELLEILEESPQRAEPVCCLYGRCGGCALQHLNYEAQIEAKTAILKDAFSRIGGIALQEISICKSSPFEYRNRLQFHKTVYGKPGFKERKSSRLVILEDCPVADIGIREALREGKIQPPHGRERFTVFSRQNTFLCEGAIEQGRVSVLGKDLSIDAGVFFQSNIDMLEPLIADLIAVAGKADKALPLADIFCGVGTFAAFLGMEFP

SEQ ID NO: 105225 - protein, 125 aa, Unknown
  Obtained from environmental sample
  misc_feature (1)..(125): Xaa is any amino acid
IYSYLQPEAIKLFKTLPCFREKYLKSIAALGREGFKNSCGEALSSMVRDYLEETVDWDVSQGIAELYRSAFILARKFVLPMNPPRVELDHALKIIFAEHGLHVKRTRFNGYNHRKSNDGVVAAES

SEQ ID NO: 105226 - protein, 268 aa, Unknown
  Obtained from environmental sample
  DOMAIN (215)...(268): PEP-utilising enzyme, mobile domain
  misc_feature (1)..(268): Xaa is any amino acid
VRQSTGKDFPQAPKDQLWGAINAVFGSWMNERAIKYRQLNDIRGLKGTAVNVQSMVFGNFGDDSGTGVCFSRDPSTGINEFYGEYLMNAQGEDVVAGIRTPEKIATLAKRNPVIYQQLVGIKNKLEKHFRDMQDLEFTVQQGKLFLLQTRNGKRAGTAAVKCAVDMVAEGLIDKKTAIMRVTPGHLDQLLHPMIDPAAGKQAVSITKGLNASPGAASGRIVFSAKDAEAWQAKGEKVLLVRKETSPEDIGGMVASQGILTSTGGMTSH

SEQ ID NO: 105227 - protein, 83 aa, Unknown
  Obtained from environmental sample
  misc_feature (1)..(83): Xaa is any amino acid
LASGGAQIQGRSGSSLKRRHHPNLTIGFLTPPVDTAMYVVSNISGAPIPKLSRSLIPFWGVMFFVLLLVTYVPGFTGWAVARL

SEQ ID NO: 105228 - protein, 71 aa, Unknown
  Obtained from environmental sample
  misc_feature (1)..(71): Xaa is any amino acid
MAKPHRGQSLRELYARGRGECPICKRKNVKVLYEQESGGKKFKICKTCKAAVKNGTKKLPAVEAAGETATA

SEQ ID NO: 105229 - protein, 85 aa, Unknown
  Obtained from environmental sample
  misc_feature (1)..(85): Xaa is any amino acid
YVTDKDKTSVPSKADGGVKGDVGSKKDGASKSDVGAKADGASSGGEGSKNDATPKGDGASKGNDASSGGGASKGGGTKGKAKPAA

SEQ ID NO: 105230 - protein, 98 aa, Unknown
  Obtained from environmental sample
  misc_feature (1)..(98): Xaa is any amino acid
SDYTAHGELLAYSEYEYDPSGNQTKWNFYNADGELYFTVEYEYDSGGNRTKWSQYTANGELSGYAECSYDSKGNIIKMSDYDADGELYSYTVFLYKII

SEQ ID NO: 105231 - protein, 175 aa, Unknown
  Obtained from environmental sample
  misc_feature (1)..(175): Xaa is any amino acid
WRLAKLIRHEGRPSALLSLRDTIGRAFMNGTVYVNDPDVIFLRSANCSLTETEKECIAVVNFLFAGQIMCSDNFLALDKTDMSFAKRIYDLYEELEGDEYGPVGLDKNVFLIESRLGTVAGLVNLTNKPFFLHEEPERFTGGTWLVDHRLSQDHKGRLCFAPRSVSICRRPYIIL

SEQ ID NO: 105232 - protein, 227 aa, Unknown
  Obtained from environmental sample
  misc_feature (1)..(227): Xaa is any amino acid
VHAASLLAGIRHPSDVARLDHEQRTALAVALREAIVGTVAANGGHLAPSLGVVELTLSLLSVFNPEQDRIIWDVGHQSYAWKLLTGRAECFATLRTGKGLSGFCSPAESPFDHFGAGHSSTSISAALGMAMARDLAGGSHHVVAVIGDGSLTGGMAFEALNHAGAMKRRLIVVLNDNEMSISKNVGALSLFLSRKMSEGWARNMRREVLGLLRSIPRIGEEVAGYAA

SEQ ID NO: 105233 - protein, 239 aa, Unknown
  Obtained from environmental sample
  misc_feature (1)..(239): Xaa is any amino acid
KIGHLYPKVNVPATKTTESYDATVIAWLWARTVQCPNPACKAEMPLVRSFEISKKKGKEAWVSPKIDKTKKLIHFEVQKGKGKIPDGTVNRNGAKCICCGGPVPLKYIRDEGKQGRMGARLMAVVTEGQGGRTYLSPDKIQTKIANIPRPDNYPEGDLPKKALSFRVQLYGMTKYTALFTNRQLSAMVTFSDLLGKAIEEIEKNIKESTNFTNETNISNEQKLDEGGTGARAYAEASGG

SEQ ID NO: 105234 - protein, 221 aa, Unknown
  Obtained from environmental sample
  misc_feature (1)..(221): Xaa is any amino acid
TSNIRNGIKNPYDYFYYDIGINGEDLAQCIQNFNEKERQLLNKTLSELTGQNISIRTEDYGNKIRMLLDEKIENDIITTNSPHISDGLLRIIAFSVISQNYDFPILSYNEQHGGLILLDEIENGINPYLTEKIIDLLRVTIKKSGRQIIVTTHSPVILNDFKQEEIIFLWKEDNGSVHSKKFFDTEEMKSLLEALNPGEVWINLEKKDILKRLSSKKEGKE

SEQ ID NO: 105235 - protein, 256 aa, Unknown
  Obtained from environmental sample
  misc_feature (1)..(256): Xaa is any amino acid
MIGSSSGTDVGNLKLTSKGSGAVIYSEGGMTILAGRSTYDIIGTNGPAIESKGAVEIGTEASGKIGNGQINITGYNTAPTAVGSSTAAIVSPTVKVIGRATDAGLTLISSKGKYVILANTPTGAAGSILAKSARFIHQVAANTDGAAVFSTNGGVELNRVKVDGAPTGTAAVNGGLITAGNAGVKIDGGTFATAAGGRGGEAIFTTGGVQIIGASIKSSGILTGSLPSYVISATGAVVVTTGDALDTAFVGFTGSA

SEQ ID NO: 105236 - protein, 236 aa, Unknown
  Obtained from environmental sample
  misc_feature (1)..(236): Xaa is any amino acid
MKKTIFYLILISCIAVCGFSQTDLQPAAIVNLTKNEPITVKQLRTEVERMEKTRGRVLTKNERLQLLDVMINEKLVIQAAEKEKIVISENEVNAQIQQLRNVLAQQLGRQPTDAEFNQAIENESGMGLAAFREQLRKQMIVQKYLLAKKEPLLKSIKEPTEAEIIEQYNLAKAQFVRPETIRFSMIQVPYGPDSASRAKARDLANSLLKEIGSNPSKFDEVVTRSYAPNSGFIAGD

SEQ ID NO: 105237 - protein, 108 aa, Unknown
  Obtained from environmental sample
  DOMAIN (8)...(104): Nucleotidyltransferase domain
  misc_feature (1)..(108): Xaa is any amino acid
MNINVPKIDTIISIIVSLASPDQIILFGSYARGDNTKKSDIDLLILKKGLKNSLDVIDSIYRSFFDHKIGVPVDLLAIDYDRYLEINNEIGYIYKTIKNEGKVIYGSL

SEQ ID NO: 105238 - protein, 241 aa, Unknown
  Obtained from environmental sample
  misc_feature (1)..(241): Xaa is any amino acid
MTNRIQMKNPIVEIDGDEMTRILWGLVKEKLLLPFVDLKTEYYDLGLLNRDATNDEVTVQSARAIQRLGVGVKCATITSNAARKTEYNLQRLFPSPNATIRAILDGTVFRKPISVSCVQPTVSSWKKPIVIGRHAYGDVYKSAEMQIPAAGKVELVYTPADGSDPQKVTVADMNGPGIALGMHNLDESIRSFARSCFIYAIKEKLPLWFAAKDTISKTYDGRFKAIFNEVYEHEYKDQCAA

SEQ ID NO: 105239 - protein, 252 aa, Unknown
  Obtained from environmental sample
  misc_feature (1)..(252): Xaa is any amino acid
KILAARYDAYKRENGLVSYDDMLRLMRNAVYSSDGGILRQLRQRLRYGIIDEFQDTSPIQWSIFQKIFLGNEDGAKIYIVGDPKQSIYSFQGADINSYISAKNAITAQNGTVYSLKNNFRSLPEMIDGYNAILCDDTESWFTPDGGDRDISYSKATAACPPPQRGAPPRPLTCKAVQVVTLTEKSVADNRKIMAETTCDAIKKLIGMTISIPNGLNWEELTLDYCDFAVITETNDFANPFIEAFMKQGIPFV

SEQ ID NO: 105240 - protein, 271 aa, Unknown
  Obtained from environmental sample
  misc_feature (1)..(271): Xaa is any amino acid
VFENIIEQAAALQLRDDILSRRLAPSMLFFGPLASGKGSAALELARSLSCETNASWKCSCPACERHRYLVHTDLLILGPRPFSSEIAASSSAFLREPSAASARILFIRGLRKLLARFSPVLMEDDPKAGKLSPLLQSLEEGLSEFDLLGADITGGKPGSLEKLCGALVKDAIKLESEGISDLIPVAHVRKAAYWCRLAPNGKRKTFLIENADRMKDEARNSLLKLLEEPPDTVSIVLTAQRREAIMPTILSRLRPYRFIKRDTETEREVIR

SEQ ID NO: 105241 - protein, 178 aa, Unknown
  Obtained from environmental sample
  misc_feature (1)..(178): Xaa is any amino acid
MKDLKLIREKRAFIIDMDGVIYHGNQLLKGAAELVEWLDKNEKSYLFLTNSSERSPVELAQKLSRLGIDVKPEHFYTSALATASFLASQHPGGSAYVIGEPGLIQALYDVGYTMNNVDPDYVVVGEGRGYSVESLERAVRLVCRGARLIGTNPDLSGPVEGGIVPACGALVSPIELAA

SEQ ID NO: 105242 - protein, 101 aa, Unknown
  Obtained from environmental sample
  DOMAIN (2)...(101): Protein of unknown function (DUF1667)
  misc_feature (1)..(101): Xaa is any amino acid
MSGMICIGCPMGCELTVMREGENWAVSGSQCKIGEKYGREEMTNPTRNVATSARIAGGDYAMLSVKTSRPIPKAAIMDCVKAVKRLELAAPVRMGDVVLAD

SEQ ID NO: 105243 - protein, 267 aa, Unknown
  Obtained from environmental sample
  DOMAIN (3)...(266): FAD dependent oxidoreductase
  misc_feature (1)..(267): Xaa is any amino acid
MYDVAIIGAGIVGCSAARELCRYSLSVLVVDKMSDVSCGASKANSGIVHAGYDCEPGTRKAALNVRGAQLYKKLAGELDIPYRNNGSMVLCLEDSGLPRLHALYERGRRNGVPMLSMLSAQEALDMEPNLSPSVKAALLAESAGVISPYEAVIAFAESASANGASFMLNTAVTGITPDESADSPSFILNTTQGKVAARAVINAAGVYSAAIHNFVSGRSETVMPQRGQYYLLDNTQRDLVARTIFQLPTRLGKGVLVVPTADYNILL

SEQ ID NO: 105244 - protein, 132 aa, Unknown
  Obtained from environmental sample
  misc_feature (1)..(132): Xaa is any amino acid
DSRDGRKYRTVTIGNQTWMAENLNYLPENGGGWSCHKYGESAYDGCWCYGRSADNCKKYGMLYSWSTAVEVCPAGYHLPSNKEWDSLGKAAGGEQSDNGFGSYYWSDAGKKLKAKSGWKNFVLSTALAEPSI

SEQ ID NO: 105245 - protein, 181 aa, Unknown
  Obtained from environmental sample
  DOMAIN (81)...(168): PDZ domain (Also known as DHR or GLGF)
  misc_feature (1)..(181): Xaa is any amino acid
SGAGRKRGALAAQVFIDSPADKGGIKPGDFITHVNGKEIRGVQQLTLTVGELKPGDRATFTVIRDKKSTDFQVRIEARTDQVSSNNSKLWPGVNVVPLNDQLKETLELPKDAKGLYVVDVTDGSPAKIVGLQRGDRILSVNGEKTENMAAFFKALREKTGSELWFGMQRGDATVESLRYKK

SEQ ID NO: 105246 - protein, 120 aa, Unknown
  Obtained from environmental sample
  misc_feature (1)..(120): Xaa is any amino acid
MDNRPILFLDSGIGGIPYACDFLKRNEYESVFYLADRENFPYGPRKKEEISSILISLTENLQKKIDPKLAVIACNTASIAALSTLRQKFPLLPFVGTVPAVKPAANACKSGKTGVLERSE

SEQ ID NO: 105247 - protein, 125 aa, Unknown
  Obtained from environmental sample
  DOMAIN (24)...(125): Putative undecaprenyl diphosphate synthase
  misc_feature (1)..(125): Xaa is any amino acid
MQFFANIERRKLRQGQIPAHIAIIMDGNGTWAKRRGLPRNAGHSRGADALRRTITEAAYLGVKYLSVYAFSTENWKRPAEEINHLLNLFMDALRKEVPELVKNKIAIRFLGGLERFSPELQGLMR

SEQ ID NO: 105248 - protein, 206 aa, Unknown
  Obtained from environmental sample
  DOMAIN (141)...(206): 1-deoxy-D-xylulose 5-phosphate reductoisomerase C-terminal
  misc_feature (1)..(206): Xaa is any amino acid
MRNISLLGSTGSIGVQTLEVLRRLPDCRVAALAAGQNVDLLLKQIAEFRPQLVSVARASDAEKIKKEFADIEVYFGAEGLSRAATADGADTVLAAVVGTSCILPVIEAIKLRKNIALANKEVLAAAGEVIMPLVEKYGVKLLPVDSEHSAIMQACPPAVTPSGSFVYPVQSIRKLILTASGGAFRSLSPAQLASCKVADALRHPNW

SEQ ID NO: 105249 - protein, 65 aa, Unknown
  Obtained from environmental sample
  misc_feature (1)..(65): Xaa is any amino acid
VGLGAGIAVLAQLGDLIESLLKRALAAKDFGRLLPGHGGILDRMDSFVLTFPLFYYFIVYFIRTS

SEQ ID NO: 105250 - protein, 256 aa, Unknown
  Obtained from environmental sample
  misc_feature (1)..(256): Xaa is any amino acid
MECDYHRKRSEHGRLKGKSPAGMVNEWAASNEINRVENAEMLDFLLSVPVGRVVQKKGIRFKNHWFIAAELGVYVDQRVEIRESPERPGYVAVFEGREGGECIAVAVCPEIEGISSAEIAARVLARQKADNAAKKEVARHLKRLAKTGNLVPEILGARETSNVAVLQRANNQTMPATVALAAAAAAESLAVRAARQAAENAEIRGAAGLSDGEVEAARHRFKAKELETAAAPKEAAELRYTHLFRELARGAVLEQA

SEQ ID NO: 105251 - protein, 157 aa, Unknown
  Obtained from environmental sample
  misc_feature (1)..(157): Xaa is any amino acid
MKDNEYESLYADSGRKLESIPSESRTLELCLTAMRWNIEEFRHIPDSLKTPEICLAAVQRLGYLLEYVPVLLRTPAVCIAAIREERNGKLLSFVPEEIKTYDFYMKVFASGEFDKKADDILDDGEFPSLGLCAEMAVDEDPDSYILNHVRMEWRIPE

SEQ ID NO: 105252 - protein, 84 aa, Unknown
  Obtained from environmental sample
  DOMAIN (2)...(81): GTP cyclohydrolase I
  misc_feature (1)..(84): Xaa is any amino acid
MTGQPDFAKLRIAYQPDQLCVESKSLKLYLWSYRDLGAFHEEVTNRILDDLVAAARPTWVKVEGDFLVRGGIRTLVVAEHGKRK

SEQ ID NO: 105253 - protein, 234 aa, Unknown
  Obtained from environmental sample
  misc_feature (1)..(234): Xaa is any amino acid
RGEVKCVGATTLDEYRRYFESDAALDRRFQTIMVEPPSVAETVQIIDGLKKAYEDHHKVKYTDKAINEAVVLADRYISERFLPDKAIDVIDEAGALKRLSGMEVPQEIRDLEHDMEEAEKAKNIAAGEQNYEEAARQKSIQDNLKDTLVLKNREWQESLNQNVLTVDEQTISRVISSMTGIPLNQLEEQESQKLLNLEEHLRTSIVGQEEALESVANSIRRSRAGAEKHQAPDR

SEQ ID NO: 105254 - protein, 88 aa, Unknown
  Obtained from environmental sample
  misc_feature (1)..(88): Xaa is any amino acid
MDNRIHFFSHKDVIPSKIQSEKLGIRGRQANEFAELGFPILPGFILDTDIASDIKPDEIEKDVLDMVDQCAAIVGKKFGDKENPMLLK

SEQ ID NO: 105255 - protein, 267 aa, Unknown
  Obtained from environmental sample
  DOMAIN (1)...(267): Glucose inhibited division protein A
  misc_feature (1)..(267): Xaa is any amino acid
GLADAAGIHFRILNESRGFAVRGPRAQADRVRYRLEARKRLEQIPGLSLKQGMVASILFGSGQRVCGVGLSDGTQLPCDAVVLAAGTFLDGQILIGDKRIQAGRAGEPASNSLPSQLKSLGFPLRRFKTGTSPRIDARSVDFGAMQPQPGDAFPRQFSFFGPRPQLPQIPCHIVFTTNETERIVRENLRRSSMYGGHVEGVGPRYCPSIEDKYVKFPDKERHQIFVEPDSLETKEIYLSGFSTSMPVDVQLQMVRTLCGFGRAEIMR

SEQ ID NO: 105256 - protein, 188 aa, Unknown
  Obtained from environmental sample
  misc_feature (1)..(188): Xaa is any amino acid
MGSKNQSKGSGLFARKSLAMLIEESKGEDRLKRALGPVQLVALGLGIVIGAGIFVVTGAAAHNVAGPSLMLSYVVAGITCIFAALCYAEFASMVPVVGSAYTYAYATLGELFAWIIGWDLVLEYGVASGAVATGWSAYFQSILSMFGVSLPKALTESPWRYDIELGRFVETGSYINLPAALIILVIVV

SEQ ID NO: 105257 - protein, 161 aa, Unknown
  Obtained from environmental sample
  misc_feature (1)..(161): Xaa is any amino acid
MLLAGLLVGCAPKTVPLPAESANECERLVAMTERVYCGKSLEEAAAAATRLFELTGGGYVVTRTADGLTARRGWSPVAPDKDAPRDGSDTWILTAKEVSECRNGSAAVPGVKLSVYHIPELYAQGLIPTECSALPAFKPVVSRFTTTPAVYDLFFSRMDHL

SEQ ID NO: 105258 - protein, 44 aa, Unknown
  Obtained from environmental sample
  misc_feature (1)..(44): Xaa is any amino acid
MSKKFQTVGSLLRPELLKRYKSQIEQRDDIAYPFYDAFSGYDEC

SEQ ID NO: 105259 - protein, 72 aa, Unknown
  Obtained from environmental sample
  misc_feature (1)..(72): Xaa is any amino acid
MSLEVRLMDTDFLIIGGGTAGCYAALTFCEHSYARVLIVEKANIQRSGCLAAGVNALNAYIGPGKTPQDYVD

SEQ ID NO: 105260 - protein, 131 aa, Unknown
  Obtained from environmental sample
  misc_feature (1)..(131): Xaa is any amino acid
MEPAKKKVYIETTIPSVITAKPSRDIRNLYRQEISREFWEYERHKYDLYISEYVLKECANGDKEAAKKRLELIKDIQLLSSNKDIDELAEEYFKYLNIPQKAKTDCFHLAVCVIEKIDFLISWNMTHLGRP

SEQ ID NO: 105261 - protein, 211 aa, Unknown
  Obtained from environmental sample
  misc_feature (1)..(211): Xaa is any amino acid
AQFLILDEPTSALTPQETDELIALLKRMSAELSIIFISHKLNEVKSLSNKVTILRRGEVVFRGNTADHSPQEIAALMTGHDVELPVRDSDGNEEKKEIALDIKNISVRSDRGFLALENFNLSIKSGEIMGLAGVSGNGQRELAEAINGLRKTEAGQILLYGNDIANKTPASVIRAGMGYIPEERNTEGIVPSFSISENIILKDNSGKEYSH

SEQ ID NO: 105262 - protein, 262 aa, Unknown
  Obtained from environmental sample
  DOMAIN (1)...(67): tRNA synthetase B5 domain
  misc_feature (1)..(262): Xaa is any amino acid
VTVRPSRTKRILGAEFPADNMVFSLNALGIKSVKNSEELVTCNVPHYRHDIAEEIDLIEEVGRQYGYDNIPGAESADVRLVRQPSTAETNRDTARFALCYFGLNEIMTNSMVSESKRKLLTPLSTPPSETQSKRPTEPVKILNPLNPDMAEMRTSMALSLLDTAAYNLNRKNANNRLFEIGKVFEPDEKSGLAIERDILAIAVEGDYVPQSWGNQKLENSFFVLKGIIEAFAAHCGWGAAKFERLVTACPLYGPESAGITLR

SEQ ID NO: 105263 - protein, 204 aa, Unknown
  Obtained from environmental sample
  misc_feature (1)..(204): Xaa is any amino acid
LLGYLNRAVPLEKTDDEEFINLVNDIRKFAMDDLGLAMSKNYTRYVELDRDYLAAVVSASAKDSFRRHEWRFPIVGAMPYKGFFNIEDARKERKKLEKKDLDVWVRSVDAFSTLGWFKDPLYSYMRDYSVGRLADLLIHELVHATVFIKGQVKFNEELAEFIGSEGAKLYVESRYGEDSDEYRESFSSDSEYKNYVSFIQELIA

SEQ ID NO: 105264 - protein, 158 aa, Unknown
  Obtained from environmental sample
  misc_feature (1)..(158): Xaa is any amino acid
MKVKIEAPDTWTFGVGKPSVWGDTFGADMFPPFPSVLRGAARASWLHENGSLEIADTDQDPTQNYAITEYALLFNGVPHFPVPADFVLGEDGLLPCALSENEGLSSLTTSHQLCPQAKTKSAKGYYISLENLQRYLNGEPVSQALPLDDFITAESKIG

SEQ ID NO: 105265 - protein, 227 aa, Unknown
  Obtained from environmental sample
  DOMAIN (1)...(226): Glycosyl hydrolase family 65 central catalytic domain
  misc_feature (1)..(227): Xaa is any amino acid
VRDKQIDISADIVYSIQKYIDCTGDFSILTEGAMELILEVARFFLSYLYYSPEHKRYEALDVIGPDEYHERVHNNAFTNRMVFSVFETAQNFIEDLQKSNPEFIASLIKRVDFNDDQLFMETVMRQFYLPRPDGRGVIEQFDGYFRLEDCTLDAVRSRLKDPKEYWGGGGGVATATQIIKQADVVTMLALFGYDYPTEVKKANLDYYEPRTEHGSSLSSCMYALLSC

SEQ ID NO: 105266 - protein, 180 aa, Unknown
  Obtained from environmental sample
  misc_feature (1)..(180): Xaa is any amino acid
MTMMGMILGAVLNVILDYIFIMVFEWGVEGAAWATIISQFASFVFLFSFISSKKAVVRLNPRVFKPDFSIIKQIMAFGSAQFLLQFLMSTVQLLTNTSVGWYGADALGVDNGGDVALSGMNIVGSILMLILMPVFGINQGAQPILGYNYGARNFKRVLRAYIGAIAAATIICVFGVAVIQ

SEQ ID NO: 105267 - protein, 271 aa, Unknown
  Obtained from environmental sample
  DOMAIN (2)...(160): RNA pseudouridylate synthase
  misc_feature (1)..(271): Xaa is any amino acid
DSIIAVNKASGIAVTGERWDGEAPRLDLLLKRELTARQESAEEAELFIVHRIDKDTSGLVVFARERETHKALSAAFESRQVKKTYIAVIHGRPLWPEGRTTCDLPLVPDGSKKHLTVIDKYRGKHSLTAFTLLFSAGNYSVVEACPATGRTHQIRVHLSGMGYPIVCDPLYGRPGGRLSYKHGIYLSSFKRGWQGDTFEERPLLERLGLHAARLELNRSLFPAPGAARTSGTVDTSGVFALEAPLSRDMAALIKQMEKCGLRQTLAMNRYL

SEQ ID NO: 105268 - protein, 181 aa, Unknown
  Obtained from environmental sample
  misc_feature (1)..(181): Xaa is any amino acid
MSVHNHSHNHSHNHDAGGDYVHAVAEYRKTFPSKSDVIKQTPDAATREMLLHMQEIGHETAFDRFDQQKPHCTFGMAGVCCKNCMMGPCKITAKSPKGVCGADADLIAARNLLRHIGAAVAGHGARGRESMLALKYAAEGKIKIPIEGKAKIRAVAQTLGIDIKGRSTRKIALKIADILLE

SEQ ID NO: 105269 - protein, 188 aa, Unknown
  Obtained from environmental sample
  DOMAIN (53)...(76): 4Fe-4S binding domain
  misc_feature (1)..(188): Xaa is any amino acid
MASNQIPDPDRCIACSTCLAACPVARAERSFPGPRLLGPVYERFRKGRGGMDEEAALALCSHCRNCEIACPSDVPVSDLILRAMHARGRRKSPRDWLLAHGDAIGRFTAFAPAALKNAGLRLPPVRMLLDLFGIARKASLPRFSGGFASRLRAVKQPGASRRVAIFPGCFVELYDAQCGMDLVFLLNA

SEQ ID NO: 105270 - protein, 55 aa, Unknown
  Obtained from environmental sample
  misc_feature (1)..(55): Xaa is any amino acid
DDEAMYIDQDFLRALEYGMPPTSGLGIGIDRLVMFMTNSPSIQDVLFFPQMRPEN

SEQ ID NO: 105271 - protein, 172 aa, Unknown
  Obtained from environmental sample
  misc_feature (1)..(172): Xaa is any amino acid
SDPNAAVYYLARMMEAGEDPKFIARRLLILASEDIGNANPNAFLLANACFDAVTKIGYPECRIPLSQTTIYLATSPKSNASYLAIDSALELVRRTGDLPVPLHIRNAPTKLMKDIGYSKGYQYAHDFERNFVEQEFLPDAVSGTKIYNPQNNARENELRAWLKSLWGGKYGY

SEQ ID NO: 105272 - protein, 90 aa, Unknown
  Obtained from environmental sample
  DOMAIN (43)...(90): HNH endonuclease
  misc_feature (1)..(90): Xaa is any amino acid
MQNDDVGNKKGIYSYVLDKEEKNLNIRAFTDNMKREAYERQQGICSNCKKHFEIDEMEGDHIDPWHSGGKTNAENCQMLCKPCNRRKSGK

SEQ ID NO: 105273 - protein, 265 aa, Unknown
  Obtained from environmental sample
  misc_feature (1)..(265): Xaa is any amino acid
MRGNDIAIFAANTSYVAIKNITVFGGGINMRGSNNNTLENCRVFYAQHFYASDFSQIEEYKWCGSMVVTGSNNRITRCEFGNTSGNGIVLGGDDNVFTNNFVHDANYAGNFFDGVYVLSSKRLEVSHNTLINQGRAHIYFAHGHSFEKCVVRNNYCENHSINVPDGAGGFYTINTNGGGSEIYNNFVVVGGGKGDNGTMKRLLSGLYVDDLSFNYSVHHNIVIGGTDAGIRHGLTHENIPPQQGTRFYSNTIIGSQNGFGFHYIY

SEQ ID NO: 105274 - protein, 275 aa, Unknown
  Obtained from environmental sample
  misc_feature (1)..(275): Xaa is any amino acid
NFISSAGKIPSAGDVEKTVQEKPEILRTLPAFYPIQVFGGCPQSCKICPYPLFTDAAGRKDFMDTSGFSSLLDKIVSFSGDAVIDLSLWGELSLHPEKMKLIEDVVSRNALSLVIETSGIGWKEQELEKCAQICSDLPKNTARKNTLPPLSWIVSFNMEPHGNGYAEAENCAKKLLSLFPKDCYVQAVRVKGSEEDTEKFYRQWKETNVIIQKFDDFCGALEKKQASDISPVIRKPCWHLMRDMPVLIDGSVPLCREDTGAIKQQSSRIIGNVFN

SEQ ID NO: 105275 - protein, 285 aa, Unknown
  Obtained from environmental sample
  misc_feature (1)..(285): Xaa is any amino acid
RTLREKLAECDSRFRAAGEREQTLLTELSAAEASRDEARNTFAGWEETVNQLRDRLSNLKMAAQSARGTRENQNIQLREQERRAVELEREGVTTAERGRTIEREIERLFENSRALGDQIARERLAVEAAREKSEKQRETIRMTESRIDEIRSFLARGAGNLADLKNQQARCQEGLRRITERTDRLGREREMKAEENRARAADIDAARRELERQNMRRETAAVEHAELESECARRAARIEELSAELSAAEAEHGQMRHRFDSLEEIERRRSNYSESVQKFLSARLP

SEQ ID NO: 105276 - protein, 251 aa, Unknown
  Obtained from environmental sample
  DOMAIN (81)...(231): ABC transporter
  misc_feature (1)..(251): Xaa is any amino acid
EHLERNCADEFKVSAAELIPDIPAEDWERNYEDVARDYDGLRKKAEEFGPINQRALEDYQEKEQEYQFKNGQRLDIEKSIADMMAIIADINQRSTEQFREAYTAIRRNFQDVFQTLFGGGHCDISLLDESDVLESGIDITAQPPGKKLQNVLLLSGGERALTALALLIAIFRYRPSPVCILDEVDAPLDEANVGRFARMLTEMSGGTQFIIITHNKNTMEAADTFFGVAMEEPGVTKVVSVDFRRRERLAG

SEQ ID NO: 105277 - protein, 125 aa, Unknown
  Obtained from environmental sample
  DOMAIN (8)...(125): Bordetella pertussis Bvg accessory factor family
  misc_feature (1)..(125): Xaa is any amino acid
MDLQQASLLLFDIGNTNIKVGLASGRAVLAGYALRTDAGQTADDLGLTLLELLRHAQLPPEAIRACVASSVVPNHNPTMREMCRRYFRQELLFAPEDLPVPLLNRYERPVEVGADRLVGAYAARK

SEQ ID NO: 105278 - protein, 290 aa, Unknown
  Obtained from environmental sample
  misc_feature (1)..(290): Xaa is any amino acid
CDEEDAPLVQISAFDEPETDIAAEAKEPKFDVGDLLDATTPFADDVETTGTIPISLSEDDNGRTPEGPEAPAIELQEEPNFTEELPLAGDAALLSNIEILEEPTPNISAPQSTETDDVAQLGIVPLAAPTGEGLSVLAGSGPGQVFDSFEENATPTETELPAKISPQLEEVPEPQADEPALAATNETAKIKVRIGDDLIENLTIEEVTAMVEDRRLQENHYIARQFSENWITAALVPALRPVFEKVRAEKVRFEVPPPPSPPGGKRGLFNGLFGRTNCGFYVFIFGVHTF

SEQ ID NO: 105279 - protein, 248 aa, Unknown
  Obtained from environmental sample
  DOMAIN (1)...(247): Bacterial protein of unknown function (DUF853)
  misc_feature (1)..(248): Xaa is any amino acid
AFSLYEMMPEVGDLEKPKIVFFFDEAHILFNEAPKSLLQKVEQVVRLIRSKGVGIYFITQSPSDIPDTVLSQLGNKIQHALRAYTPNDQKALKAAAASFRSNPEFSSEKVLGELSTGEALISVLDEKGAPKIVQRAFMLPPKSFIGPAEPERISGLIKNSPLYSKYGESIDRESAYEVLQAQKKQAEAQQQKLPPVTTRQAQTVKAPKRPSVRKTSSPANKALSSAMTQIGRAAGKALVRGLFGNVKF

SEQ ID NO: 105280 - protein, 274 aa, Unknown
  Obtained from environmental sample
  DOMAIN (1)...(274): 4-alpha-glucanotransferase
  misc_feature (1)..(274): Xaa is any amino acid
GPYAVLCALKVENNEASWKEWTKKEKPKESDVVFQEWMQWVAEEQFLKAVGELNELGVRLKGDIPILINEDSADVWHSPQFFSLENRAGAPPDMFCYSGQNWAFPTYKWDNLEKENFGWWRDRVKHAAKFYHAYRIDHVLGFFRIWVVPEVEHTGILGHFVPSVPIYMNEILQAGIPKETVHYLTTPNFGEEQLRHWFGFATEDVKQKYFEHLRDDRYLLRSEYRSEREIISLKEEQHIKDALLNVYWDRVFVPSSTEETLWPYWYWYNAPVLL

SEQ ID NO: 105281 - protein, 278 aa, Unknown
  Obtained from environmental sample
  DOMAIN (1)...(223): Competence protein
  misc_feature (1)..(278): Xaa is any amino acid
VLASLPPALLYLWIGNAPPSLLRAAVMLGLFSFLMLRDRVCTLGDILCGAVFCITIFSPLAIHDAGLQLSALSVAAIALCAPLLRRLPLPAAKGFWPTVARRSAQIVCVSFCIQLVLTPVMLLLFGNASPWFFLNLFWLPLLDCLVLPLALLGAVLLAAGAQSAASLLCEAAIRLCELLPMLMDGMARHGLLSLPAMLRPHWTALFAFMLLMTALALLPGRSGPPPAARRLLAASVLFFLIGPSLRALDDMAPGPSLHLMDVRQGQALLIQAPGGARM

SEQ ID NO: 105282 - protein, 254 aa, Unknown
  Obtained from environmental sample
  misc_feature (1)..(254): Xaa is any amino acid
DRVWGGHDGKVHSATGFEGEGTISAIHNEYPDKFPDAAKEPDTQIFDVTLKNGQVLAFGSSRLIIACDWNPTPRRAVALDTQNAVYNKVVKDWLARNGLPDAAPNIVQLFQVDLEGDGVDEVVIVARNLVGQETQAVSREADTPPSSGTGLPGAPKKGDYSLILLRKVIGGEARDIALARFIVLQDARPGDTDWKPPVVHEVYQFADLNGNGVMEIIAGAEYRDGSRYSVYEIRGGEAVPVLRNGWGYQSGFTR

SEQ ID NO: 105283 - protein, 279 aa, Unknown
  Obtained from environmental sample
  misc_feature (1)..(279): Xaa is any amino acid
MYVQPDTNEKAIIKIDIPRSIFVHKSPGGYYYRIGSSKREMQPEVLARLFQQRTQNRLIRFDEQVLMNSTVEDLNEKLWERFRTPLSPLNNPEFLEKMKLVSPDEDGTLHPTVGGLLMSCESPERFISNAFIQAVCYLGNSRDSKQLDAQDITGPLDMQIKEACKFVQRNMRISAIKDPGRIETPQYSLNAVFEAIVNAVAHRDYSIYGSKIRLHIFSDRLELYSPGSIPNTMTIESLSLRQSSRNELLSSLLARCPMNFDATGSKRLYIMDRREKESY

SEQ ID NO: 105284 - protein, 160 aa, Unknown
  Obtained from environmental sample
  DOMAIN (26)...(83): Protein of unknown function (DUF434)
  misc_feature (1)..(160): Xaa is any amino acid
MSNEQKQTRRGYVAADDKDFSGPGLVTLKKAQTEIQWLMDRGYAIKNTVEFVGNHYLLSGRQRVALLRATSSTAAVKERAGKTVSDCRGKIVSIDGFNLIITLEVALSESTLIKCMDGTIRDLAGLRGTYRLIDKTDKAICLIGKKLASMSVAGVVFYLD

SEQ ID NO: 105285 - protein, 263 aa, Unknown
  Obtained from environmental sample
  misc_feature (1)..(263): Xaa is any amino acid
SARSPFEKKTDEETRKRDTQDKLVPPVLNQRFDAPRFGSNTFSIDYRLNPQSTSTLNFDSRRWKDNTEIDWGDISNIRSNFRVDPNINLNLSHSEGLYSTSFAFTGDGFWTQYSYLNEDAEEYLTDPYPRQKIANDRLKESRSSFFTTSYVSSTTIRPFFQNAIFGQSNLAYNLRGIAVKSKFVEKDMTAVPSQDRTDFLESWAENPEWEMEYAAWEKEKITAHSLSANITASIMDKTHSFTMTAELPPRDASLNWNTALNIW

SEQ ID NO: 105286 - protein, 296 aa, Unknown
  Obtained from environmental sample
  DOMAIN (68)...(187): Recombinase
  misc_feature (1)..(296): Xaa is any amino acid
DKDSTGGIDVAFRFVMHEYYSKDLSKKVKSAKRVQMLAGENIVAAAIYGYRKNEEPGSPGCGKWEPDPVPAGVVQQIFQMALAGLSTSQIRDKLHKAKYPTPKEYLELKRGKDIVPGCMWTARMVLHTLDNEQYTGSYVSGKQEQTRIGSHSSKWVDKSEWIIIPDSHPAIVSKEDFAKAQEMKNYRKGVTTDKPMQSDMTRQKRARMVSGDFIAATPIYGYAKMESGKWEIDEPAAKVIREMYEMALQGLSCQEISGKLSESGYAIPIDHIKLGRGYDVTPSNRWTSKMRPYNPQ

SEQ ID NO: 105287 - protein, 286 aa, Unknown
  Obtained from environmental sample
  DOMAIN (50)...(169): Recombinase
  misc_feature (1)..(286): Xaa is any amino acid
MVNEAFALDIGRKIRTTKQMNIRNGCFVGKIAPYGYLKSKTDGHKLVPDEYAGPIVRRMFEMAAEGQSVSAILQWLNDSGILPPKRYLHTIGVTSAKEANGHIHWNKGVLYGILRNRVYCGDMVQGKGKTNSYVVKRVPESEWVITENTHTGIVSRELFAEVQKLRDKPGESKNRYDTPSTVNIFLRKVFCGHCGHTMFRRRNGETHYRFGCGTRQLYDKDDCTLVSISENELREKLLIMLRNQETALADVLNSTNGAIQPAAADNNELASVRVELNKNSRFPAGL

SEQ ID NO: 105288 - protein, 244 aa, Unknown
  Obtained from environmental sample
  DOMAIN (105)...(243): MutS domain V
  misc_feature (1)..(244): Xaa is any amino acid
LKIRYNRLIGYFFEVTKAHLDKIPQHFIRRQGIVGGERFSTERLAGLESDINGASDKIIELERRLFLEIREKAKLVLGELAAESRRIAELDAAQSLARAASLRGWVRPIVDNSNALEIYEGRHPVVESHLGRGEFIPNNIILNNQADSPFFAMITGPNMAGKSTYLRSAALITLMAQMGSFIPAREGRIGLCDRIYCRVGASDNLARGESTFLVEMNETAYILNTAGEKSLVIRMRLDGEPAPM

SEQ ID NO: 105289 - protein, 237 aa, Unknown
  Obtained from environmental sample
  misc_feature (1)..(237): Xaa is any amino acid
LPNDTEWTTLTNSAGIKLKAARGWNDNGNGTDDYGFSALPGGRYEERFQFVGEYGNWWSATETEGYANYANIQYIHKGCSGCDAPVNMGNGTKATGLYSVRCLHGPAPVPSSSSVVLSSSSSVPSSSSVLVSSSSIPSEIVYGTVTYNGKVYKTVVIGTQTWMAENLNYAVDGSKCGDKGYTTDENTTTCDTYGRLYNWETAKTLCSSISGWHLPSNEDWSKLYRYVDGTSGTDSLY

SEQ ID NO: 105290 - protein, 214 aa, Unknown
  Obtained from environmental sample
  DOMAIN (1)...(184): 3-octaprenyl-4-hydroxybenzoate carboxy-lyase
  misc_feature (1)..(214): Xaa is any amino acid
MRGEPLELIRCRSIDLDVPAHAEIVLEGFIRAGRRGREGPFAELMGYYSEAGTAPLMEITAVTQRSNPIFQHAFPCREEHLAYGIMREVEIYAALSSVVDVCDVNLTLGGGCRLHAVASLRKRNDGDGKSAILTILGSYKDIKHVVVVDDDVDIYDPADVEFALASRFQASNDLVIVPGALGSPLEASHLERGVSDKLGFDATKPLGPTAKRYE

SEQ ID NO: 105291 - protein, 93 aa, Unknown
  Obtained from environmental sample
  DOMAIN (4)...(80): BMC domain
  misc_feature (1)..(93): Xaa is any amino acid
MTGTALGMIETKGLVGAVEAADAMVKAANVTIVGYEKIGFGLVTILVRGDVGAVKAATDAGAEAARAVGEVVSVHVIPKPHTDVENAILKKFQ

SEQ ID NO: 105292 - protein, 261 aa, Unknown
  Obtained from environmental sample
  misc_feature (1)..(261): Xaa is any amino acid
EFTVQQLERLAGEVRRFLIDSVSGTGGHFASNMGTVELTVALFHAFDFLTDRVVWDVGHQAYPHKILTGRWPQFSTLREVNGISGFLKRDESPYDHFGAGHSSTSISAALGMAKARDLQGQDFACIAVIGDGGLTAGMAFEALNQTGFIKPKRFMVVLNDNDMSINPNVGSLQGYLNHIISGQYYHKWQDRLENAIDRFAFGKMQSALKRFVKRGHEVIKQIVVPGLLFEDLGFRYIGPVNGHNLKSLANSLSEAKEKMRD

SEQ ID NO: 105293 - protein, 76 aa, Unknown
  Obtained from environmental sample
  misc_feature (1)..(76): Xaa is any amino acid
MNKTTLKKDQKLNSGFIILDTVELEELKAQGIWAKHEKTGVEVFHVLNDDDENLFSFSFRTFPEEYTGVAHILEHS

SEQ ID NO: 105294 - protein, 143 aa, Unknown
  Obtained from environmental sample
  DOMAIN (31)...(95): ATP synthase alpha/beta family, beta-barrel domain
  misc_feature (1)..(143): Xaa is any amino acid
MIFDTNTISRHFDSYLDFIRATDSIRVYGKVTEVIGILIESSGPAASVGDVCRIEKGGRLICRAEVVGFRKDRTLLMPLGPIEGIHPGMAVAGTGRPLSVQIGDALLGRVLDGLGNPMDGKGPIRATAGRSVFSSIPNPMTRQ

SEQ ID NO: 105295 - protein, 93 aa, Unknown
  Obtained from environmental sample
  misc_feature (1)..(93): Xaa is any amino acid
ENGTCITECLSKDGRVHDPQRTEFIADHLEQVERAIAEGIPYKGYFYWSLLDNFEWHWGYKYRFGLVYVDFETGKRTVKDSGHSFSKVIKGGG

SEQ ID NO: 105296 - protein, 265 aa, Unknown
  Obtained from environmental sample
  DOMAIN (69)...(117): Regulator of chromosome condensation (RCC1)
  misc_feature (1)..(265): Xaa is any amino acid
VGIENDWAVVSSGNSRSLAIKKDGSLWTWGYGGYGFNMGMDPLPIRIGADNNWVAISSADSHTVALRTDGSLWAWGSNEYGQLGLGGDTAIRYTPTRIGTDCDWAAVSAGFGFTHAVKKDASLWAWGYNGDGRLGFGDTVTRYIPERVGTENGWTAVSAKGHTVAILDDNVLAATISPSVATNKNVTWSCSNPSVATVSANGLYTKVTAVDKGTATITVRTNDGGKTATCAVTVTAATVPVTGVTLNKATMNLTVGSQEQLTETV

SEQ ID NO: 105297 - protein, 236 aa, Unknown
  Obtained from environmental sample
  misc_feature (1)..(236): Xaa is any amino acid
MAAAFRKNKGRIDVREGFAIVTFSWLATTFIGAIPFFTFLSAHSGASPFAVWTDAMFETMSGLTTMGATVIADVESLPRSILFWRILTHWIGGMGIVTLALALFPAFGVVAYQMFRGETTGPTKERLRPRLAQTAVILWGVYAFFTLLETVLLMAGDMPFFDAVCHSFSTMATGGFSTRNASVASFDSAYIEWVIIAFMILGGTNFFIHYRIIFHNDWETLKRNREFRLFAAILVA

SEQ ID NO: 105298 - protein, 284 aa, Unknown
  Obtained from environmental sample
  misc_feature (1)..(284): Xaa is any amino acid
MFISKYRQAIRFKILALTLFTVLTRCANPVDDGADGGRFTFTVADVGQGLAQFGVVGKRAVIWDVGDQYAAWRGAYVNLGSPRIESIIISHTHADHYGALQSFGASLDWSGEIIVSPYEDTAALRKSAPAWADRITFKHCARGDTLRPLGAAVAVVCVWPPSGLNIEAPIPDNQKNHYSLAFSVRHGNARALITSDIDSAAMEEIAAHSRYDLRAQILSVPHHGSAGSVNPLFFSYAGPDVAVISCSSNNTYGHPSPKMIDALMYQSGRIMYTYADGTVTFGSN

SEQ ID NO: 105299 - protein, 225 aa, Unknown
  Obtained from environmental sample
  misc_feature (1)..(225): Xaa is any amino acid
MDKRLFQECDEKCLRDEPAACTSRCPVHVDITSLAGEIEKGDYKNAYKILEKRLPLASIIAMICDHPCESACVRNMPIRISELERAAVMYGRSPKKKLVSLPKKKGNVAVVGGGISGITAAFELDKKGYNVTIYEQSERLGGRIWDFEHVSRELIDDELRRIGDMDIKLALNRKIDISALGPLTNEYDAVYLGTGIWEEFLPIAPDTFQVLNSSVFAGGRLSGSD

SEQ ID NO: 105300 - protein, 199 aa, Unknown
  Obtained from environmental sample
  misc_feature (1)..(199): Xaa is any amino acid
IQEAAIKAIRKIDQKHAVIAGGTNYNSIEKMTKLPVYNDENLIYTFHFYDPHIFTHQGAVWNKPSLAPLSGLPFPFDKNKMPEVHETFIGTWVEESLKNYEEDSKFTKLLSTLDKAQKFSKEKNAPVFCGEFGVFMKQSPHEDRVKWYKFICTELEKRNIPWICWDYFGGFGIFKTEQRGSFPSDLDIDIVKAIGLNVK

SEQ ID NO: 105301 - protein, 248 aa, Unknown
  Obtained from environmental sample
  DOMAIN (43)...(248): Uncharacterised ACR, YfiH family COG1496
  misc_feature (1)..(248): Xaa is any amino acid
MTGRLLSRGHNGLKWYEFPGLAAHPELKHGVLTRFGGLSGPEGRELSLAFNETDPPENVAANLGRAEAALGLPPAAFARQTHGTEILTVRPGDGYHPRTPAETRAGYDALLAPAPGVSLLIKVADCQAVLLYDPVSRALALAHCGWRGSVQNILGRVVAALADTGVPPARLLAAISPSLGPCCAEFVNHQAELPPAFIPFMVRENYFDFWAISRRQLAEAGLLDENIETAGLCSRCSPEFFSYRRGDL

SEQ ID NO: 105302 - protein, 235 aa, Unknown
  Obtained from environmental sample
  DOMAIN (112)...(167): Signal transducing histidine kinase, homodimeric domain
  misc_feature (1)..(235): Xaa is any amino acid
EIQKYVVLPDVSLSADVFDVSKPGPAKLLTSAGTAAPKPAPQAAPKPAAPAPQARPAAPTPVPQAAPQATSVPQAAPAPQAKPAAAAAPAPAGGGAASSASEDAKKAGKEAGSILRVDSKRIDDLLNLVSETVITKATFNQISSQFGEIQGQLHAIEGQYREKIKSLFDGLPEYLEGIQEGKSVKDIRKEINEKYGDIFSLFDGFETSLKTTVGKFRSNSQNLGRISGELQEGVM

SEQ ID NO: 105303 - protein, 194 aa, Unknown
  Obtained from environmental sample
  DOMAIN (32)...(138): Biotin carboxylase C-terminal domain
  misc_feature (1)..(194): Xaa is any amino acid
GQDIVRWQIGIAQGEKLPLEQKDVPLWGHAVQARVNAEDPKLGFAPSSGKITYLRTPTGRNLRNDAAVYNGWSLPIAYAPILSILSAWGPTRKDAILRMATALSEYRVGGLRNNIAFHKALNEHRPFRRGETNTTMLDHNWWGESELGPDLQFVVAAALFDELEKEEMRAQQPPNRHGEADPLQWKYWGKFNRL

SEQ ID NO: 105304 - protein, 181 aa, Unknown
  Obtained from environmental sample
  misc_feature (1)..(181): Xaa is any amino acid
MNSNYGALPTLVMPMTHNRKMKTVCSEPQQEGELSIFPYDGIGIYDRRRFIQIGGYDTTIKNPHWQLLDFGFRAYLWGEEISLNLHYKISCDGELPPQDFTVEENYRRFYLKNLAPVYKRDYAHLPFYRFPAFFWKSGEDVFLAWEEFLQTRKWVKKNKYRWKCDAHSVTCLWDNASKQGE

SEQ ID NO: 105305 - protein, 272 aa, Unknown
  Obtained from environmental sample
  DOMAIN (158)...(249): Peptidase dimerisation domain
  misc_feature (1)..(272): Xaa is any amino acid
KYINTSIPVILQAHTDMICVPTDADFSAGVEAYYSVENRMTGRSAVTKEKTSLGADDGIGVAAILAVLDDCDIVHPPIVAIFTAEEECGLTGARDISAEDIVGIAAGLDFGRAAFINLDNGHFGEFSVGCAGSINVTVKVPVMRMQLPPPLNSSRFELAVCGLTGGHSGLSIHEKRGNANILLCSAIRKLYSAEVDLQILGLGRCGDASNAIPSAASAYVAIPSDHEDMLRAAAAKVESEFKEKHRDSDAGVRLEVREGGESNHGMPYSALT

SEQ ID NO: 105306 - protein, 273 aa, Unknown
  Obtained from environmental sample
  misc_feature (1)..(273): Xaa is any amino acid
TITYDDTTTEDVSAADFTSKNITTDPPQGSHLAHQKHDGRPVTITYGNLTPLNTGNLTVGPKNIPFIVDPIPTQTYTGSEIKPAIIVRDDTTILMPDDYTEAYSNNTNVGTATVTITGAGNYAGSSGSATFTITPRVITFNVEPIPAQTYTGSEIRPEVTVKDGTKELTLTTDYTVTYGNNTNTGDASVTIAGAGNYAGSTGKADFTINKAAGATVGTPELDTRTHDSIVIKPVSAPGTGQSVVYAINTSDTAPATGWQATTTFSNLKQGTTY

SEQ ID NO: 105307 - protein, 187 aa, Unknown
  Obtained from environmental sample
  misc_feature (1)..(187): Xaa is any amino acid
TSIWDLAFAECVGLTGDLVIPDGVTSIGFGAFAECSGLTGDLVIPGSVISIGGKAFEYCRGLTGDLVIPGSVTSIEYMAFYGCSGLTSVTIRNGVTSIGWAAFDICSGLTSVTIPNSVTSIGREAFFRCYKLASVNFYGTIPASDFSTDNSFPGNLRTKFYATNPTNGTPGTYTTANPGSSAVWEKQ

SEQ ID NO: 105308 - protein, 53 aa, Unknown
  Obtained from environmental sample
  misc_feature (1)..(53): Xaa is any amino acid
ATPQYSGQLITNHIDDYGFLRYEMGYAAAVSVALLCIVWVFSKLAYTFFGERD

SEQ ID NO: 105309 - protein, 281 aa, Unknown
  Obtained from environmental sample
  misc_feature (1)..(281): Xaa is any amino acid
FSKTARVTTFIRRAETGDYVAVRLGEVKPAKGSPFGKQQQEAPLVAPTMPGKFVKEETSLDAIEKIKKELSLAADSGDQREIRRLRDELAEYKRIEEMNKWEEVKGNELKIEGLLGKKEEKLRDDGNNGEYSQLSTLNDHPADVRQRVSSERASQLTKNEEKSKEKIEENKVQYEEYRIPFPAEILAPVPDQTVDYSEQELHEIGMDIESKLDNFKVKGKVTGIMTGPVIIRFEIEPGPGIKVSRFESLADDLALLLKTASVRVISSIPGKSAVGIEIPNR

SEQ ID NO: 105310 - protein, 220 aa, Unknown
  Obtained from environmental sample
  misc_feature (1)..(220): Xaa is any amino acid
MARKPALGRGLDALIPGGDFSYEKGTEAVEADINLSSDIDVGADIAPLPEQLVVSDQLEPQPSPEGDDISDEAALSALTSINYAPVEPEPEPSLEGEDSLIEPEPSLEGEDSLIEPEPSLEGESSPIEVPVEPEVSVEPEVSVEPEPEPSPEGEGSPLEVSVEPEVSVELEVPVESEVSVEPEPEPSPEGEGSPLEVSVESEVPVESEVSVSGEGGDLPL

SEQ ID NO: 105311 - protein, 222 aa, Unknown
  Obtained from environmental sample
  DOMAIN (1)...(187): PHP domain
  misc_feature (1)..(222): Xaa is any amino acid
YETHCHTSECSKCGKVSAKELVGFYVSKGYAGIVITDHFIGNTAVPPHYNWKNRVNYFCKGYNAAHEEGKKLGLDVFFSLEYSDMGNDFLLYGIEPEFLLENPDMGDIGMTKLLRRARDAGAFIIHAHPFLQAEYIDSIRLVPSLIDAVEVVHGGGGSGKEFTRRNMFYAEEYGLLKTGGTDTHHFNIEGKLTGIAVERRSENIFDLASQIKAGKSRVLEPV

SEQ ID NO: 105312 - protein, 173 aa, Unknown
  Obtained from environmental sample
  DOMAIN (9)...(173): Short chain fatty acid transporter
  misc_feature (1)..(173): Xaa is any amino acid
MANQSKGNAIANMGISFTKWTMKYMPDPSIFAVVLTLIAFCLGIILAKQTPMLMIQHWYRGFWSLLAFAMQMALIIVTGSCVADAPQVKKIIQTLARMPKTGAQAALLITFVSILVSYLHWGLTLVVSALLAKEIAKVMRRNLIPFEYGLLVAAAYVGQMTWHGMTSASIGLL

SEQ ID NO: 105313 - protein, 195 aa, Unknown
  Obtained from environmental sample
  DOMAIN (3)...(195): Pyruvate kinase, barrel domain
  misc_feature (1)..(195): Xaa is any amino acid
MKNRKTKIVCSLGPASAEDSVVRDLILAGMNVARLNFSHGNDDEHRASIERVRRVSGELGIPVAILLDTKGPEIRTGMVENDGKVTINKGDQIIISTDDCFTTAAGNGAPARISLSWKEAESKLQRGHRVLVADGLLELEVIDTAGGVKCRANNTAVIGSKKNVNLIGIHAGLPIMGEQDKKDLEFGISMDLDYV

SEQ ID NO: 105314 - protein, 99 aa, Unknown
  Obtained from environmental sample
  DOMAIN (11)...(65): Helix-turn-helix
  misc_feature (1)..(99): Xaa is any amino acid
MSLERLVIDNIKRIRKEKGISQEKLAEACNTATSYIGLMEIYRNVPKLSTIEKIADALEVDPLELFDREIQYPAGKQKKLFKKRILSAVDREIDKILGQ

SEQ ID NO: 105315 - protein, 260 aa, Unknown
  Obtained from environmental sample
  DOMAIN (1)...(149): yrdC domain
  misc_feature (1)..(260): Xaa is any amino acid
VARVFEVKRRPYFDPLILHIAEKERLGDLAVDVPMAAKRLIDALWPGPLTVVLPKKPVVPDIVTAGLPGAALRMPSNEIARGLILAAGVPIAAPSANLFGSVSPTAAEHVRAQLGSAVDMVIDGGECSVGIESTIVSFMGGEPTLLRPGGTALEEIEAVIGRVVVPEIEELVNQSPGRSGTHYATSTPLIRIGGVDEIGGINIWCTDPSKPIAKIGLIALSPASVPDPAALPPAVVNIEYLSASGDLREAACRLFAAMRR

SEQ ID NO: 105316 - protein, 251 aa, Unknown
  Obtained from environmental sample
  misc_feature (1)..(251): Xaa is any amino acid
LDGVRDGYLVNPVVADARTDISAQLLSENGYAVIVQDEEGNEAEEVFIYKEFEKKFFSDNTNRAFCKVFLDNALRDPISGEIGKTIVFCVSQDHAAKITEILNQYADAMFPGKYQSDFAVQVTSSVNRAQEFTVQFSSNKLCGYANFDPSYRTSKTRVCVTVGMMTTGYDCTDLLNICLMRPIFSPSDFIQIKGRGTRRHNFIEEMIDSAIKARIGDQHKTNFKIFDFFANCGFFEEKYNYDEVLSLPKVN

SEQ ID NO: 105317 - protein, 253 aa, Unknown
  Obtained from environmental sample
  DOMAIN (1)...(253): N-6 DNA Methylase
  misc_feature (1)..(253): Xaa is any amino acid
SQGDAGQFRTPRHIIDFMVEVIDPQKDEIVLDPACGTAGLLISSYKHILKANTKKTPGDLLTTSERKKLMDNFRGYDISPDMVRLSLVNLYLHGFSQPKIFEYDTLTSDERWNEYAGVIPTNPPFMSPKGGIKPHKKFSIQSTRSEVLFVDYIAEHLTTSGRATVIVPEGIIFQSGTAYKQLRKTLVDKYLYAVVSLPSGVFQPYAGVKTSILFLDPLLARKNDSILFVKIENDGFSLGAQRRAIDKNDLPEA

SEQ ID NO: 105318 - protein, 154 aa, Unknown
  Obtained from environmental sample
  misc_feature (1)..(154): Xaa is any amino acid
MVTLGQDEGGTGGRAAPPFFGHAVDYTTVHSWWNNDDILWDSLATKIPDKPCLVQETGLMRLEDKDGLPWRGIEGSAALLERKFALALLGRGAGAVQWAWNINTDMDNDNEVVIGLFRPDGTAQPEYDVVRSYGAFAAGAAKYLEDWGEDEIAI

SEQ ID NO: 105319 - protein, 212 aa, Unknown
  Obtained from environmental sample
  DOMAIN (77)...(212): Peptidase family U32
  misc_feature (1)..(212): Xaa is any amino acid
MQNQIEIMAPAGSYESLMAAINAGAHSVYFGAENLNMRARNSNNFGLEDLAKISTICKEKNVKCYLTLNTVIYDNEMEQMRRIVDAAAQNGINAIIASDMAVLSYARKKKIELHASTQLNISNIEAVEFFSAFCDVMVLARELTIYQVADIIKEIEKRQIKGPSGNLVKIEIFCHGALCMAISGKCYLSLHHYNHSAHRGDCFQVCRRGYSV

SEQ ID NO: 105320 - protein, 79 aa, Unknown
  Obtained from environmental sample
  misc_feature (1)..(79): Xaa is any amino acid
LAFRTTIKAARAGGDGGNGYAFIADEVRNFAQRCSMTAKNAADMIEKSVREADDGIKLVEDAAKSIGKIVDAEPVTLTA

SEQ ID NO: 105321 - protein, 278 aa, Unknown
  Obtained from environmental sample
  DOMAIN (157)...(272): MMPL family
  misc_feature (1)..(278): Xaa is any amino acid
MLPPLSQSKAVMEADMILSEKIGRELVILSAAQNFENAKKGAEMLFANFEHSPDFEKISLYFDSAVMAEFSRYLYDYRFVIAGKETFDLLENGRAEEIAQDALASAFGVINFFPLDNIENDPFFLTERRMREFLSSSLLAGGSLSIKDDVLTAQKDGASLDDATWYVLLHLVLTPQAASLRAGQNAVGKIYALAPEIKKTVPGLEFYFSGIPFHSYESASGAQREISLISAITIIIILFMFLYAFRSFLPVFFSILATGVSLGTAAAAALLVCREIHI

SEQ ID NO: 105322 - protein, 148 aa, Unknown
  Obtained from environmental sample
  misc_feature (1)..(148): Xaa is any amino acid
LGNGSNVLFSDKGFNGLVIKVGKHLASGKSLHDVIQTAASKGLGGMEKLDGIPGTIGGAIFMNASAHGQQISDCIKSVVSVTTYGGIVTRTNEECRFSYRNSVFRMLDEIIISAEYDLVPMPREIINKNRKEVLAWRREKQPLKYPNA

SEQ ID NO: 105323 - protein, 165 aa, Unknown
  Obtained from environmental sample
  misc_feature (1)..(165): Xaa is any amino acid
VKVQCLANPIYSPPKTASRNFSILNMAFKQRLFYGGRRQKFTGKERDAETGLYYYGARYLDSKTSRWLSGDPAMGEYLPSAPVNDEAKKRNGNLPGQGGVFNHVNLHAYHYAGNNPVKYVDPDGEDFYNFTNKNIIVVQENGEGILVKPNHVFRGKIDGAIIDNG

SEQ ID NO: 105324 - protein, 61 aa, Unknown
  Obtained from environmental sample
  misc_feature (1)..(61): Xaa is any amino acid
MSDLKIDVKNLDLYYGEFQALKNINFSIKQQDVAALIGPSGCGKSTFIRILNRMNDLIPSC

SEQ ID NO: 105325 - protein, 286 aa, Unknown
  Obtained from environmental sample
  misc_feature (1)..(286): Xaa is any amino acid
LFSYKAECPFFSSTAKDIRLVVQRINEFSVNGVTYIDHNTFIDIPRNTENIVIRFLNGDKEEVLNILVNNEEKNPEKKLSFTYNGDVKITYPESYVYTASWRATIAALEKKVHVILAEPPYNIFSFLGGVEWHPTRDKIFGVFPMIAGTLLASFGAILLGVPIALLCALFMAEFLKPKPASVVRAGVELLAGIPSVVYGFFGLMVIVPFVRETFNVPSGNTLLSAIIVLALMILPTVITIAETSLRAVPLSVKEASLSLGASKMQTAWRVVLPHANSGVLPEYSGH

SEQ ID NO: 105326 - protein, 236 aa, Unknown
  Obtained from environmental sample
  DOMAIN (71)...(235): Pterin binding enzyme
  misc_feature (1)..(236): Xaa is any amino acid
MGPDVFAEKVGDIAKRFGLSIVGGCCGTTPGHIRALKPKVDKLPAPRRTPKLERHAASLYHAVPLQQEPRPLIIGERTNANGSKLFKTLLAKEDWDGLISVAKDQQKEGAHLLDVCVAHVGRDEASDMERFLSKLVTQITMPLMIDSTEVRVIEKALEVAPGKCVVNSINFEEGEVKARQILDLCKRYGASVMALTIDENGMAKTTDRKVAIAERIVGLVVGEYKFQPSDLIIDTL

SEQ ID NO: 105327 - protein, 208 aa, Unknown
  Obtained from environmental sample
  misc_feature (1)..(208): Xaa is any amino acid
MRLLFWAILTVVAVWAALAWVGSALQWSSGKLHDDRDGKEYRIVVIGGKTWMAENLDYQMSRGSWCYRNNDSNCVKYGRLYNWRAAKSACPAGWHLPTVHEWDSLGKAAGGQRDTYGGHINWRGTGKRLKAKHGWKSDISGKRGGGTDSRGFSALPGGNRRPDDYFFTVGTDGNWWTATTSKNKGSAHILSMSLDSDDLEEATTSKEY

SEQ ID NO: 105328 - protein, 172 aa, Unknown
  Obtained from environmental sample
  misc_feature (1)..(172): Xaa is any amino acid
SQHLDGGAGTYTRKAGQNNWAKQGGSASTTMDKLTFVATKEGGYEAKQGNNQISGAVVIPATFAGKPVTGIAASGFAGNVNITGVTIPNSVTTIGGSAFWGCKGLTSFTIPANVTTINKNAFAGCTNLNSVTFQGKVGSIDNNAFPGDLALKHLDGGRGTYTRPAGKNNWAK

SEQ ID NO: 105329 - protein, 232 aa, Unknown
  Obtained from environmental sample
  misc_feature (1)..(232): Xaa is any amino acid
MVSRRVLTAMLAMALVLGMTACGKGSKEDSKAAESKSGNSGSMKWEEVWSSPFDDSDVSNIAYGNGKFVALAKGSKMAYSTDGETWTVVKEYPANVGLMAIAWGKDKFVAGGLGLAYSSDGVKWTSLDLNPQNTGFLAIAWGKDKFVAVGMGIAYSSDGKTWTTVVDPNANLFLGAIAYGKDKFVAVGNGRIAYSSDGVKWTTVDVSGIFGTRGPKAIAYGNNKFVAGGEKG

SEQ ID NO: 105330 - protein, 123 aa, Unknown
  Obtained from environmental sample
  misc_feature (1)..(123): Xaa is any amino acid
MRIQDALIKLLMIQPFYGALASVLSIQESDSVKKKEMSLLPSPSLKYNKKWYEELQDAQALGVLMHELLHLLLLHALRQGGREPLLWAICCDMAVNDHIPGEMLPDDAVTTEQIELIVKCKLE

SEQ ID NO: 105331 - protein, 168 aa, Unknown
  Obtained from environmental sample
  misc_feature (1)..(168): Xaa is any amino acid
MKRQKKLKGGRRLNRSYGGDAFIYFILVVFGLFFVFPLVFSINHAFKPLNEIFLFPPNIFVRRPTINNFQDLFVIMSKSWVTFSRYIFNTVFVTAVGTAGLIIIASMGAFVISKYRFPGAKVFFSGVIITLMFSGYVTAIPNYLVMAKLGWVDTYLAVIVPAFAMPMG

SEQ ID NO: 105332 - protein, 244 aa, Unknown
  Obtained from environmental sample
  DOMAIN (74)...(243): Protein of unknown function (DUF1385)
  misc_feature (1)..(244): Xaa is any amino acid
MLRSSFTGIGAAAAGVMRFFSALAAPVAIGGQAVMEGVMMRNGDTYALALRLANGAIEAERLPWFTLTRGWLKAPFVRGFPTMIETLVNGVKALNKSAVRSAEGEGEDIKGWHLALTVIVSIGMAMLLFVAAPHLFSVGMQMLGLSGGMEGVTFHLWDGLFKFLIFVGYILAISCVPDIRRVFQYHGAEHKVIRAFESGDEVSASSARRFSRLHPRCGTTFLLFVLSLAIVLHTAAVPLMLHVW

SEQ ID NO: 105333 - protein, 252 aa, Unknown
  Obtained from environmental sample
  misc_feature (1)..(252): Xaa is any amino acid
MPIVFRKLVKLRNILTRQRHEPDETEITAEKWVADFSKPKQARFDIKSESSYDANLRKSHFSSGYSLALCLKKTGCIAWTDAPERRYRDLVISGSIRIDARGGYGAGGMFFRMVDSETYYSFLISSRGYFRLDAVRNGMPFPLIGWTEFPLSTGAALAPDKSVDFSIIAYGSHITILLKGCWAAEIEDTSIMEGTIGFAAASYESGDPTYLVINESDNISYTVEAFLESLTLDSRINEVSSLYEKWRENPDI

SEQ ID NO: 105334 - protein, 274 aa, Unknown
  Obtained from environmental sample
  DOMAIN (6)...(31): Bacterial regulatory proteins, lacI family
  misc_feature (1)..(274): Xaa is any amino acid
HPKTKITQNDVANHAGVTRSLVSYVLNGSNRTVAPETRQKILSAIDELGYRPNKFAQALSMGNQGVLADRHIGIVLRYEKMFLRPYYTEILSGIYSAAHEKGFHIRFIRFYDELKDPVIFNQMIHSEEICGLLLLAIEKCLSAPEDWKLLERVQAQIEQIVCIDWQAPGLSSVSVDRQAAALQATNYLFDQGYKDIVYIGQSDQRVSGCKQAFVERALDVSGLYTAYAYDMETGYNAVMTLHKDRITLPEAIFAGSDEVALGILLYLHEQGITV

SEQ ID NO: 105335 - protein, 75 aa, Unknown
  Obtained from environmental sample
  misc_feature (1)..(75): Xaa is any amino acid
MLCNRSMRITEYEKNVIIDAVKSTDPNAKVWLFGSRVDDSKKGGDIDIGILSSNVDVMEEIEIRQKMYDKSGTKN

SEQ ID NO: 105336 - protein, 263 aa, Unknown
  Obtained from environmental sample
  misc_feature (1)..(263): Xaa is any amino acid
MNITVGNWWHSYDTKVTPPTNQWVGSEYQEKQLDYRKRLLQQYNFTMAEKNIASWNEMPQITATSIMAGRPAATIFVLQPDWALALYRQNLIYPVGKSKAVNWTATTPVEWNRAVTSAFKFKNGRTQDAYAFAEGYGGSYHAACVFFNKRLFREAGLDPNLLYDLQKSGQWTWDKFLEVAKQLTYDKNNDGIPDTYAMPADLSTEILDAFVSGNGAMYVDKDKNTGNLIFAAHRPEFIQAVQFYMEVRDAKVMKPKTARREYP

SEQ ID NO: 105337 - protein, 98 aa, Unknown
  Obtained from environmental sample
  DOMAIN (59)...(92): Tetratricopeptide repeat
  misc_feature (1)..(98): Xaa is any amino acid
MKWNSTLERTIAECDLAIRLDPNDAKAYIVRGNAYFYKGDNDRAMADYTEAIRLDPNYAAAYVYRGVAYYDKGDINKAIADYNQSIRLAYNNANACKN

SEQ ID NO: 105338 - protein, 62 aa, Unknown
  Obtained from environmental sample
  misc_feature (1)..(62): Xaa is any amino acid
MLSKRIIPCLDVRNGKLTKGVKFEGNADIGDPVETAGRYYEEGADEIVFYDITASHEGRGPF

SEQ ID NO: 105339 - protein, 113 aa, Unknown
  Obtained from environmental sample
  DOMAIN (1)...(98): DnaJ C terminal region
  misc_feature (1)..(113): Xaa is any amino acid
VQVDKDARFERKGSNLYIKLPISFTEAALGAKVEVPTPESKTVIRILPGTQSGSKQKIKNEGMPILKSGQRGDLIAEIQVVTPNIQDERSKELLRELAEINDKDVRAAEWGKQ

SEQ ID NO: 105340 - protein, 87 aa, Unknown
  Obtained from environmental sample
  misc_feature (1)..(87): Xaa is any amino acid
MGPVWWLAPLMFPLELLGLISRILSHSLRLFGNIAGEHLVAGIFFGIMPLLLPVPLMFLGIFFGMIQAFVFIMLATIYISGAVAHEH

SEQ ID NO: 105341 - protein, 115 aa, Unknown
  Obtained from environmental sample
  misc_feature (1)..(115): Xaa is any amino acid
VRSRNDQVLTDLRLYLRRRLASLALLSARLASDFHDFAQRAAQFAMPGYTHMQRAMPSSAALWAGAFAEALADDAEQLLAQHALADISPLGSGAGYGVSLKIHRGLTARLMRFSR

SEQ ID NO: 105342 - protein, 220 aa, Unknown
  Obtained from environmental sample
  misc_feature (1)..(220): Xaa is any amino acid
MPESIKTEDFFISAAQLNGRMLKFVPEELRTQELCFEAVKNHGAALWSTPRQFITGNLCRTAVETCGGALKCVPTEFKTKEVCHLAVQENGMALENVPENLITADLCLKAVENNVDARMFVPKKYQTEELWRMLVSHSWLCFKHLPASLMSEEFCRLAVQHSGMALWFVPDKYKTKELCFEAVRNDGHALTFVDVSKLTKEEYTELCRLSLVRNNVMKAY

SEQ ID NO: 105343 - protein, 257 aa, Unknown
  Obtained from environmental sample
  DOMAIN (43)...(255): Transposase DDE domain
  misc_feature (1)..(257): Xaa is any amino acid
MTQQAFSLARQKIKWEAFREMFDFTVTTFYKINEPLRWNGYRVSGIDGSKLALPDDESLLKYFGGFGTNKESPTAQGSMLYDLLNDVVMHALIDPVKTGEQAQAWAHIQHLQGLESFEGGKELVILDRGYPSKELIQGLMDKKIDYLMRVRTKFSKAVDALGLGDHRIELEYGKKRIPVRVIKLVLDSKETETLITSLTDANYGVEDFKWLYFKRWPIETKYDVIKKKLEIENFSGKLVDNIRQDFYATMTLANIAA

SEQ ID NO: 105344 - protein, 245 aa, Unknown
  Obtained from environmental sample
  DOMAIN (3)...(240): Acyl-ACP thioesterase
  misc_feature (1)..(245): Xaa is any amino acid
CLVRFGAVDKSDSMTLNSIFNFFQEAAISHAESLGVGREAMARTNQVWLLSRMSVQVDRRPRFGETVTVRTWPRGAEKLFTRRDYDILDANGHAAVRASSSWLIVDIIKRRPLRPQTLLENMPSNEGLDALPAAAASLKENSSLQKSSEHPALYTNVDANGHVNNISYIRWIEDAITPEFLEQAKQMRLDINYLNEILRNEITGLWVAPIETTPAAGETPPPAHAFAFEGRKENQAAFRAELRLW

SEQ ID NO: 105345 - protein, 133 aa, Unknown
  Obtained from environmental sample
  misc_feature (1)..(133): Xaa is any amino acid
VDAAQSAGVRRIDVSKMNINLLAFPGHKGLLGPQGTGGLYISPGVEIKTIIQGGTGSDSELLEQPETMPEKFESGTLNTPGLSGLAAGVRFILERGIEEIEHREALLTKRLIEGVSDIESIQLIGPAARCDRG

SEQ ID NO: 105346 - protein, 289 aa, Unknown
  Obtained from environmental sample
  misc_feature (1)..(289): Xaa is any amino acid
SQADADTASVKTDVKASDVKTAVNTTADANVNPEAKASDSVQKRAAGSDLPISAHDSASRRRRSSVESANRMASKSAERAAMGSKPSSSGDSAELPLSVTAMAHGKKAAKSAEGETKSAAAELQTHGQTQSKAKNAVADGEAAELPVSVMESTEKKPAEKKAHGSHAGSAKAAAKAAAKSVANAVGAAIDAASAKAETAAANKAADDAFVAKLKQTVEVGGLIKNISGKSSGNSAAKSAAEKSAASANSSLSSNSSVNGIESNADADLSVDNGDEREAGGTGAVDTSSS

SEQ ID NO: 105347 - protein, 274 aa, Unknown
  Obtained from environmental sample
  misc_feature (1)..(274): Xaa is any amino acid
IRVHLGNKDKVTVEIKDDDGNVVRTMTASGKDAQNSVTINWDGVKDDGQKAKAGKYSIDVVGSDKDASLYCYVQEVVEGVRFTGEGAMIKIGGKEISIGEVLDVSINESGEGGSYITPSNALSMLGRTVRAKYGEIRHSAYGIAEGVDYPINVNASRGSAVEVQIKNGRGDVVATLKGTANDFGELQLNWDGLTKDGDMAGPGVYTVNVVGSDKNKSLYAYTEGVVDGITSLTGDFKMKVNGQEVALSDIISVTATSSANALNAPDNIGKPRCR

SEQ ID NO: 105348 - protein, 63 aa, Unknown
  Obtained from environmental sample
  misc_feature (1)..(63): Xaa is any amino acid
MIFPLEELIKYSENMYEITSAASRRSYQLSMLRDPEIDDYNGKVVSLAARQVFTKEIEFRLEE

SEQ ID NO: 105349 - protein, 125 aa, Unknown
  Obtained from environmental sample
  misc_feature (1)..(125): Xaa is any amino acid
VREPKVLRASARGYLGISSKCMSVTASREGKIPVLILFGPTASGKTALLEQLFIRNPLCGAEIISADSMQVYRGMDIGTAKPTAEEQARIPHHLIDIREISEQFNAGEFVRLAEEAIRLAASRSR

SEQ ID NO: 105350 - protein, 249 aa, Unknown
  Obtained from environmental sample
  DOMAIN (31)...(249): ABC transporter transmembrane region
  misc_feature (1)..(249): Xaa is any amino acid
MSSSDNEPTKKSSVREFRSLFPYFRKYSLSYAVGFFFLIVVDAAQVIIPQFIRQAVDIASSGVFEIRKVIIPCAIMVGLMGIVSLGRFFWRYFIHGSSRRIETELRKKLFDHLLSLSYDYYQKNKIGDLMARATNDLDAVRESIGMGLVALVDGTVMAAAILVIIFVQDTRTAAYAVIPLPLITILILLFSGVVGKRFQRAQETYSALSDAVQETFSGIRVVKSFVKEWWFIKKFADTNDDYRDANMEL

SEQ ID NO: 105351 - protein, 123 aa, Unknown
  Obtained from environmental sample
  misc_feature (1)..(123): Xaa is any amino acid
RICPDGWHLPSIAEWMELARYVEEDSRCTDCAGYLLKAAEGWNNNSQEQSGNGIDKYGFAALPGGLDYFLEGDYGVWWSADEDKSKSNNAYSLYIVNYEDKSFYMSNKKTSLLSVRCLKDLPD

SEQ ID NO: 105352 - protein, 226 aa, Unknown
  Obtained from environmental sample
  DOMAIN (2)...(208): DNA topoisomerase
  misc_feature (1)..(226): Xaa is any amino acid
MGALTGKIAKHAEFALKNNYIYKTPRIFNTAKVSDHHAIIPTGNVPETLSEAEQKIFNLICQRFVAVFYPAAEFLHTTRITTVEGETFISEGKVLKEPGWKAVYGKESEDEDIMSQLSSPDAKPLAKSIEMTEDATKPQARYTESTLLSAMESAGKLVEDEDLRDAMKERGLGTPATRAATIEKLISDKYLTRDGKELLPTGKAFDLINTAISMQIENLTSPELTG

SEQ ID NO: 105353 - protein, 273 aa, Unknown
  Obtained from environmental sample
  misc_feature (1)..(273): Xaa is any amino acid
VYSIYQLKLSGYEAMVADDWIRAYYIFQELLGLTPNDPDAKNFFADCKKKTTEIAFFMDEMEVSINETLTNVIFSLPAHQKKGQDRSVMRVASFSYTPDYAYGTGIEYMVFDTDAHPLLYLQAPYAKFLPITLDDQERVIVLMRALDRNDRTKRWEPEWTAQNETVYHPQMAQVTLDIDYETFLILPQMRQGLPSLDINTLFTASGIAGETGYIPEVFEAEVINRLGSCLFFLPMAVLAIIIGWRYRAKQRPRYFFVLLLPVLPVVFNGMVYL

SEQ ID NO: 105354 - protein, 107 aa, Unknown
  Obtained from environmental sample
  misc_feature (1)..(107): Xaa is any amino acid
GVGKKLIEYTVTKAKEMGFNAIMIYGNPKYYERFGFKNSREYTITDMEGNYNDALMALELYPKSLENINGKFFEGEAYKIDKNELEIFDKNFPYKEKLVLDTQIFKE

SEQ ID NO: 105355 - protein, 262 aa, Unknown
  Obtained from environmental sample
  misc_feature (1)..(262): Xaa is any amino acid
VSIRFTGGDLLPGTEPLNIGDEYIEFDGDESDGKPGWGLITLEGWITSSVVASYFDGSTMSFYGIIYLSNGASIENKANIIAKGSDGCAIYNASSGTVTISAGKIEVPRGSAVRNGSDGILKISGGTISTTSGYAVYNQSTGNVEISGGTISAKESGSGVYNNSTGTVNITGGTVSSVNREAIHNHSAGAVVISGGMVSTTNWFAVSNNSSGKVLAIGGTVSAKRKDIKYINDNDSGIVIAWENPPEELEIYTAGTSEDIFY

SEQ ID NO: 105356 - protein, 102 aa, Unknown
  Obtained from environmental sample
  misc_feature (1)..(102): Xaa is any amino acid
MGKRVLGFEIDAITNSIKNVISGDSFQTEIYRLAKTDLKLITKKNKWNFNWKSEFENNAKEVYKLTIVNNPSVIQGLLSLSIEQGHIYINLLENAPFNIGKK

SEQ ID NO: 105357 - protein, 195 aa, Unknown
  Obtained from environmental sample
  DOMAIN (29)...(172): GAF domain
  misc_feature (1)..(195): Xaa is any amino acid
MSKRNAYSNKITDVLNKTAIIFLTQRDGAFDDTMTRGLKLFCDALNLDTVSIWRNFHEPDGLHVSQIYRWNRESGGTTKPPPGLEDITYAELAPQWEFILAEGKSVNSPASLLPEAVMLKSFGIASVFVEPLLINNVFWGFALFGDHRDERYFDDDSMGVMRSAALLCANTVVLHEKTHNERKTNKILERRMKYT

SEQ ID NO: 105358 - protein, 265 aa, Unknown
  Obtained from environmental sample
  DOMAIN (1)...(98): Thiamine pyrophosphate enzyme, N-terminal TPP binding domain
  misc_feature (1)..(265): Xaa is any amino acid
MITGIAESFYDSQPVFFITAHSHKETLSDTDIRCEQNQEFNTVKMLSAITKYAVSIERPDDVRYELEKAYHLAVNGRPGPVLIDFLTSVLNGDIAPESEWFFIPDEPVADESSSNEAIIDCIKRELGKSKRPVLLIGDGIRLSDTGEYLRKFVHRWNIPVLSSRFSQDIIPISPNYYGYIGSRGTRYGNFILSKCDLIISLGNRLMFKPDSKSFGVITNRAKIIRIDVDKDELSRKIPNTECFICDLKNIMPAFADSDINWPDNT

SEQ ID NO: 105359 - protein, 264 aa, Unknown
  Obtained from environmental sample
  DOMAIN (1)...(128): Transglycosylase
  misc_feature (1)..(264): Xaa is any amino acid
MRAGVNNLRGGATQGASTITQQYVKNRLIDAAYHDNDPFGIIDARAQTLPRKAREAALAMELERHLSKEEILEGYLNLAQFGVNNIFGVETAAQFFFSKSAADLTPVEAATIAGITNAPGRFDPIRNPELSQTRRNLVLMTMHRNGFITEAEYNEARNTPLAATLNVTPVRPGCQAAGDSAYFCDYVINVIRNSPEFGETEAERIALLQSGGLRITTTLDVVAQAAAVETVNRHVPPQNSANLDAAIASVEPGTGKIRAMAQNT

SEQ ID NO: 105360 - protein, 255 aa, Unknown
  Obtained from environmental sample
  misc_feature (1)..(255): Xaa is any amino acid
MYQPASVVVHFEGISNGTDVSEGLKQYQIVNQKKFFDKWKEVLEKDYFLTGENVFLARDKSKNKKTLLMIDHYVPHFDKDAGSRTVFQYLKLFVSLGFNVKFIGDNYYKHEPYTTILEQMGIEVLYGPFYAQNWKMWLEANGMYINFVFLNRPHISVNYIDEVKKRTKAKVFYYGHDLHFLREQREYKITKDKKLLKSIKEWEKIEIELMRKADVSFYPSHIEVDEIKKQYSLINVKAIPAYLFELNLRKKGFYN

SEQ ID NO: 105361 - protein, 268 aa, Unknown
  Obtained from environmental sample
  misc_feature (1)..(268): Xaa is any amino acid
YHSHSVTSIGTSAFSSNKLTSVTIPNSVTSIGSFAFSDNKLTSVNIPNSVTSIGTSAFSDNKLTSVNIPNSVTSIGSLAFSSNGLTSVTIPNSVTSIGSYAFDCESLTSIEVASDNAHFSSVGGILYNKDKTKLIMYPRGKSSGGTYTIPNNVTSIETFAFSDCKLTGIVIPNSVTSIGSYAFIKNNLTSVTIPNSVTSIGDSAFEYNEQLNSVTIGANVNVGKAVCRRHAGKETIDGGFEEFYVKNGKKAGTYTYDGKNWSAKNAPA

SEQ ID NO: 105362 - protein, 50 aa, Unknown
  Obtained from environmental sample
  misc_feature (1)..(50): Xaa is any amino acid
MSKQIISTESAPAAIGPYSQAILIDGLLFASGQIPLLPETGDVVQGGINE

SEQ ID NO: 105363 - protein, 161 aa, Unknown
  Obtained from environmental sample
  misc_feature (1)..(161): Xaa is any amino acid
MGDERNSASSVNSALVVRALTGDGQIRMSAIDATLLWDGVRRGHPDLEADACGPLTELLAGAVLLQSRSLLTERVQLVIRSSGRAKAIVADSWPDGSIRGILDLNPACADGQWLAFPGQLQVMRSNPKGQPYIGNLELVDGPISAQLEYYLQQSEQIQACA

SEQ ID NO: 105364 - protein, 255 aa, Unknown
  Obtained from environmental sample
  DOMAIN (1)...(188): CTP synthase N-terminus
  misc_feature (1)..(255): Xaa is any amino acid
MGKVFSTLIDSERQGVYAGTTIQFIPHVADVIKNHLFKIASKENADILLVEIGGTVGDLENEFYIEAARQLFNIVGPDNCIFAHLTYVPIPNGTHEQKSKPTQMSVRGLNERGIYPDIIIGRCSESLTPKIKEKIALYGNIPSKNVISGLDMESVYEIPLSYQEEGILDIIFKKLKIVGVSSPRMDEWKRLVEVCKRKYEDPKKTLNVALCGKYMQLEDSYASIREALIHAAANLNVACKLKMLDTEFLNKPEGK

SEQ ID NO: 105365 - protein, 275 aa, Unknown; identical to SEQ ID NO: 102196
  Obtained from environmental sample
  misc_feature (1)..(275): Xaa is any amino acid

SEQ ID NO: 105366 - protein, 256 aa, Unknown
  Obtained from environmental sample
  misc_feature (1)..(256): Xaa is any amino acid
MYFCSREAPQTIRVSPLDTIPWNLLKTIAIIELYLEERWTEDADAKPLPYSLLCHQSLSVLTSLGEQTEEELFRQVRSLPPFGEIDPEDYAELLSFLEEGNYLERTEEKKLIIGLAGEPIVNHYSFYSVFPDEEEFRVTYLGKELGKVNFIPPEGGGILLGGQNWKVEQVRLRGKEICVVPGSGEGRRIWRGGGTSLHTKVARRMKQVLLENRSYPYLTDAAATRLREAGEWAREMKLEKGLFVPLEKNYTTNAAS

SEQ ID NO: 105367 - protein, 94 aa, Unknown
  Obtained from environmental sample
  misc_feature (1)..(94): Xaa is any amino acid
MGKEKGSYFVCPNCGAELPTGASVCSECGSDENTGWSENTYLDGIDLPFDEDDYEEVKKREFGGGSKKRFHVNWMAAVGIAVVVAMLMAFVWQC

SEQ ID NO: 105368 - protein, 88 aa, Unknown
  Obtained from environmental sample
  misc_feature (1)..(88): Xaa is any amino acid
MSGKNKKNSFIEVTSVPTKSGKGVSSVIPTLLSYPGSIIVLDFKGENFHNCPSLKKQYKIKTQGHMTILEPKTEHAQTQPKPIKKTVK

SEQ ID NO: 105369 - protein, 232 aa, Unknown
  Obtained from environmental sample
  misc_feature (1)..(232): Xaa is any amino acid
MNNIKMGPKLIASFLFLAALAAFMGIRSISSLKGVAEAANQMYETGAVPLGIFVGSAVKVQDLRVGARNWQIARSNDERANIIKGMRASNASLEQELIAQEKLTDEEGKKLLRKVSKVTDDFIDTLEAFAKRTKNFSPEGVCLDPLPDGLTKVGSQALADLDAVKEYMTKQTRGLADTAADHASSSVSQATVILVAVILIAVALGIFLTLSITAPLSKTVGILGKIEKGDMT

SEQ ID NO: 105370 - protein, 65 aa, Unknown
  Obtained from environmental sample
  misc_feature (1)..(65): Xaa is any amino acid
TTFNCYGELNKIRVHNEGPNGIFNRGSFYFKEKKWSEKEMVEIMKEVAEKSVYYYFSKYGENCFE

SEQ ID NO: 105371 - protein, 247 aa, Unknown
  Obtained from environmental sample
  DOMAIN (1)...(71): Toprim domain
  misc_feature (1)..(247): Xaa is any amino acid
MDYLTLYQAGIRNAAAASGTAFTEEHANLIKRFASKATLVFDGDRAGLSAAQRAALVLAPFDLQVSILALPGDDDPDSFVKRDGAEAFLSLLEKARPAADFLIDRLVSESDGSPYGKSRAMDELMPYAYALSDEVVRQDFLDMIAQRLRIDRRLVANRFGGGAPYRAPAADGARPDVSQDSDGVLTLGKLEEDFLSIVINVPALIVSARRYLSPEILTDPVAENIYSIVLRTYDRDGSLEGLIEACG

SEQ ID NO: 105372 - protein, 272 aa, Unknown
  Obtained from environmental sample
  DOMAIN (1)...(271): Major Facilitator Superfamily
  misc_feature (1)..(272): Xaa is any amino acid
AALIAAGQIGAVWAASFLPLTLTQGILMQAGAAAGSFSVLIGIVARRLPDDKRSMASGLINAGGSLGQFVFAPAVQALIHVRNYYAGLIFLAISSLVSILPAWLLCRRQGVHSELRAEPDNATRDTPGLRQQLRLAVKNRSYILLHAGFFTCGFHVAFLTTHLPGEIDLCGHAAAVSATSLSLIGLCNIAGSVLVGIMGKHFRLKYILAAAYFFRALMIAVYLLSPKTEMTFYIFAVTTGLTWLATVPPTAGIVGKLFGTRYLATLFGLTLL

SEQ ID NO: 105373 - protein, 254 aa, Unknown
  Obtained from environmental sample
  misc_feature (1)..(254): Xaa is any amino acid
MTPIALMRIAFKALLRNRMRTFLSVLGIVIGVAAVITMVAIGEGSKKSIKEQIGSLGANVVMIFSHPRPASGLRPDGSTVQLLTMNDVQILRKRSEYLVAISPVVSARGQVVAAGGNWPTTITGVYPEYLKIRGYELEYGTMFEGEENMSKVCILGKTVADNLFPDGDPVGQTVRYKNIPFKVIGLLKSKGVAGFGQDQDDIILAPFSAVQRRVLASTNVQSIYAATSDERSAPLAVEEVKTILSEERKLPADN

SEQ ID NO: 105374 - protein, 74 aa, Unknown
  Obtained from environmental sample
  misc_feature (1)..(74): Xaa is any amino acid
MSITKKRLEEIKAFKNTDFSDCPEMTDEQLSQLKPSHYRNMANYKPIKKTVNVRLDADVIEWLQSAGRDYQTRM

SEQ ID NO: 105375 - protein, 269 aa, Unknown
  Obtained from environmental sample
  DOMAIN (1)...(269): Aminopeptidase I zinc metalloprotease (M18)
  misc_feature (1)..(269): Xaa is any amino acid
DSPRLDLKPKCVYEENGPGLGLLRTNLYGGLKKYQWLARPLALWGFCALKDGRTVEVVFGEDPRDPVLTVPDLLPHLDRKVQREKKMGEAIVAEKMNLLAAALPIGEPEAKDRLKLAVLKILHDRWGLSEEDLISSELEIVPAGPAREVGLDGALLGGYGQDDRLSVFAALSALLAGPAPRRPTLVIIYDREEIGSYGATGAGSRFIEDLAARAFEASGLEPRWAAVREALRNSQGLSADVEAAMDPDYKEVHEEYNSARLGRGPCLVR

SEQ ID NO: 105376 - protein, 258 aa, Unknown
  Obtained from environmental sample
  misc_feature (1)..(258): Xaa is any amino acid
VDDTKETIRLENPIKIKDVFPGDDLGNSIISVNGFLQDGEYELADGDICAIRVFPEGNGADWAVGAGIGLSAAMGVLGFLSLANIWNPVGWIGLAIMGGAAVAGALGFGIASAAGWSVTGWLGSLGANAQDVKSPDKLEGIPQLRGAKNQSNYGKPVPLVLGRHLFTPMYVGNPYSMIGGEDGEFQYYHALYMLGYGKLKVTDVKLGIIGDLASNVVPDEQATETLNRMSVAGDTWTVDRLGFVKCSGSLICEFQVND

SEQ ID NO: 105377 - protein, 247 aa, Unknown
  Obtained from environmental sample
  misc_feature (1)..(247): Xaa is any amino acid
LDDASSTDLASDDFAGISLDDESSADLVSTDIASDDADLAMDDFADISQEDTETIANAQESNELDKLREEGAVPITETPENSEYLENDSLDLSDAVIDEPELSTDHIKDDIAEPSLDEEDFDMDSFDNLSIDSDNLDDFSSLDDTAEQPEEEAPAPQPAAKAPPPVQEVSQPMPQQPAPQAASASASAGGGGQPTDGKTPFVLPSGLRSELRNILSYMDQLLESLPEEKIEEFAKSEYFDSLQKLFK

SEQ ID NO: 105378 - protein, 225 aa, Unknown
  Obtained from environmental sample
  DOMAIN (9)...(178): short chain dehydrogenase
  misc_feature (1)..(225): Xaa is any amino acid
MVGIDITGEVALVTGGAGDIGGACCDAMAKGGAKVAVTDVVQERIDAVVERINKAYPGMAKGYLLNVTKKEEVDSVFEQVSKDLGDVSILVCTAGHAGENANFFEATAEEARAIYEVNIIGTQFCIKAAAKQMMPKKHGKIVIISSISARLGPTSLVNYGGSKFALLGLTQSVAQLVAKHNINVNAICPGFLLTNMWHRGLERFSKAWNCTKEEAWKKVALDKIA

SEQ ID NO: 105379 - protein, 272 aa, Unknown
  Obtained from environmental sample
  DOMAIN (100)...(252): Thiamine pyrophosphate enzyme, C-terminal TPP binding domain
  misc_feature (1)..(272): Xaa is any amino acid
MRIVAHPDLTKIGFNAPADIAIVAGAGAAAKQILEAVKAKIKPVESGEWQQEAKALTAKFNAAFIESAASTLQPPHPGRLAAEVSKFILEEAKDWHIICDGGDSASWMDGHSVATYPGQVIRYGPLGTIGTGQGQAIGAWAADGKPVLYYTGDGSLGFYSMEFDTFARHGIPVVCVISNDSAWGMIKLSQAVSNAEYVGKHGHLANLLHPMRAYENLPSVWGGIGVRVTKYEDIIPAIRKVRDSGLPGIVNVQVDENEMAPATAAFAGPKKK

SEQ ID NO: 105380 - protein, 123 aa, Unknown
  Obtained from environmental sample
  misc_feature (1)..(123): Xaa is any amino acid
MTNQQRYDPLNDYLFYKVMGEKGDEIQLLGFINAVLGKTGNDRFTAVEIIEDKSFSPKVIGDKSSILDVRAVLQSKTRVNIEVQIRNQNNMDRRSLFYWSKEYSESLNAGQDYRELPDVIAIN

SEQ ID NO: 105381 - protein, 277 aa, Unknown
  Obtained from environmental sample
  misc_feature (1)..(277): Xaa is any amino acid
LTDNGAGGLSSSVGEMCRESGGADIDLAKAPLKYEGLQPWEIFISEAQERMTLAVPPEKLEEFLKLAARREVEAAALGTFTASGTLTARYGDRVVAHLDLGFLHEGCPRMTIEARWKPPRIAPPKPPRKGARGRMLLKLLASLNVCSKEYKSRQYDGEVKGLSVIKPFVGVYSDVPSDATVMMAEHGCRQGIVSAEGINPFYSDIDTYDMTASIIDEAVRRVVSVGGRLDRIAGLDNFCWPDPVLSEKTPDGHYKMAQLVRANKALYDVATAYKVPL

SEQ ID NO: 105382 - protein, 152 aa, Unknown
  Obtained from environmental sample
  misc_feature (1)..(152): Xaa is any amino acid
MLNILGCAHFPGDDEALPVFTFYDSKAGVEFSNILEIHTLELQKLPEGTDGTELYDWAKFIAAETEEELIMIAERNPQIGKAVAKLRELSADERARDLYERREKARRDMAAQQKWARQQGIQEGRQGEKFEIARNMILDGESVEKILRYTGL

SEQ ID NO: 105383 - protein, 39 aa, Unknown
  Obtained from environmental sample
  misc_feature (1)..(39): Xaa is any amino acid
MPLEPGMVVTVEPGLYDPAWGGVRWEDMVLVTDEGNRVL

SEQ ID NO: 105384 - protein, 183 aa, Unknown
  Obtained from environmental sample
  misc_feature (1)..(183): Xaa is any amino acid
MNIAFVNATRKWGGVKTWTLDVGEALRARGHTIRIYCRQTCFAQQAKIRAGHGETLAFGPDLNPLSILGFMRIFRSQGIQAVFVNVEKDLATAGVAARLLGIPVIQRIGLPQDIPARFKARALHRFIQPLFFCPCRYIADGFLRSLPYIRPDRVHTLLTAKTIPDAALTPHTPRQLVATQQLN

SEQ ID NO: 105385 - protein, 254 aa, Unknown
  Obtained from environmental sample
  DOMAIN (1)...(250): Pyridoxal-phosphate dependent enzyme
  misc_feature (1)..(254): Xaa is any amino acid
TSLTTETGAGQWGTAMAMACAFYNLALTVYMVKISSEQKPYRKALMEVYGGKVIPSPSGTTESGKKILENDPNTGGSLGCAISEAIETAVKTDKCRYVLGSVLNHVLLHQSIIGLETKTAFDKYEIKPDIIIGCAGGGSNLGGLIAPFMGEKLAGKSNARFIAVEPASCPSFTRGRYAYDFGDTAKTTPLIKMMTLGSGFIPSANHAGGLRYHGMNSTLSKLYQDGYLEARSEIQSSVFDAAVRFMKVEGILPA

SEQ ID NO: 105386 - protein, 215 aa, Unknown
  Obtained from environmental sample
  DOMAIN (49)...(177): PA14 domain
  misc_feature (1)..(215): Xaa is any amino acid
MNGVRLSHWVEQVATVSHDTAFKNIVIRDSLPFTLTNSTTGMYQFSRRGNNGFFWIDGRGFGNEWVSEGSANHNFAFTMEMEFPFDAKSGMTFNFTGDDDVWVFIDNKLVLDIGGIHSEESASFQLSNVLPPSEMGKRHTLRVFYAERHSTGSNILIQTNIVAPPAGVGISTKDNTGSGGMVGNSIDKSADTTITLYSVVRNEDGTVRVPNTEYD

SEQ ID NO: 105387 - protein, 241 aa, Unknown
  Obtained from environmental sample
  DOMAIN (143)...(208): His Kinase A (phosphoacceptor) domain
  misc_feature (1)..(241): Xaa is any amino acid
MNNIYAIIKDAILVFNEHNRIMDANPAALSAFSGFSFDSGQSTLEKFFTYLHGQNAKCTPDDLFEPLKKGNTERNGEIKLYRSDGQIKTFMVTLKTIMVRKKPTGCILIMSDVSVYHSMISEINIQNARLAELRREAEAASMAKGAFLANMSHEIRTPLNAVIGMALIAGKNAETPKTLSAIKEIETASVHLLGLLNNVLDMSKIESGKFELINESFSLKNAMDEVVRLITLRCAEKNIRL

SEQ ID NO: 105388 - protein, 77 aa, Unknown
  Obtained from environmental sample
  misc_feature (1)..(77): Xaa is any amino acid
MRGKYAPKLGKVVKVLCDRGYTGEKFASAVTSLLNAEVEIAKRNELHIFTVLPKRWIVERSLGWLEHFRRLWKNYEQ

SEQ ID NO: 105389 - protein, 277 aa, Unknown
  Obtained from environmental sample
  DOMAIN (103)...(168): Bacterial Ig-like domain (group 3)
  misc_feature (1)..(277): Xaa is any amino acid
AYSKTFTVTIYAVELTNIMIANKPSKIDYWQGETLSLAGLTVRGYYNNGSDKLETGWTASPVSGSALSTISSNYYIKISYNSKDAFVTVNVREITLSSISVTALPTKVEYNINETLVTAGMVVTAYFSNNTNAVTTNYSVSGFDSSTPGTKNVTVTVQNKTATFNVTVKMAALPVEMVSIPAGVSVTIGGDGYSTAKTLTIPQFAMSKYQTTQAQFESVMGYNNSNFKTAPNADKPVETVSWYEAIQYALRMTLASDVPQGVKDDIAQWQIANPNKT

SEQ ID NO: 105390 - protein, 281 aa, Unknown
  Obtained from environmental sample
  DOMAIN (186)...(254): Bacterial Ig-like domain (group 3)
  misc_feature (1)..(281): Xaa is any amino acid
TATVTVNVNDLTSDQIASITATQPAKKEYFKGDALETAGIAITAAYSNGTTATVSGGTFNPTNGTKLDTVGIQNIIVTYAGKTATVTVNVNDLTADQITGITATKPTKSEYFKGDALETAGIVITATYSNGTTAIVSGGSFNPANGTQLNTTGTQTITVTYSGKSTTVTVNVNALTDSQITSISATKPTKAEYFKGDGLETAGIAITATYSNGTTATVSGGTFNPTNGTKLDTVGVQNIIVTYAGKTATVTVNVNDLTTDQLSSIAIKTQPTKTSYFAGGK

SEQ ID NO: 105391 - protein, 210 aa, Unknown
  Obtained from environmental sample
  DOMAIN (15)...(208): EcoEI R protein C-terminal
  misc_feature (1)..(210): Xaa is any amino acid
RFLTKPRNPKETSGNGAPADPPTVVSAEGFTVEISPAGRFVPIEENGRQKRISVEEFKQGLARQLIADTATLDEFRAKWINNTERCAMMQTLVTSGYAPRLVQWVENMTDYDLYDVLIDIAFGATPHKRVERAYNFGSKQRSWLETMPQETKAVILAIVAQFGQEGSDVFENPQLFKVDTIRKAGGLDALRWNGGAAELMAETKRRLFAA

SEQ ID NO: 105392 - protein, 234 aa, Unknown
  Obtained from environmental sample
  misc_feature (1)..(234): Xaa is any amino acid
MNKRKIAKKSKISKKISKKTKATKTHKAAKASKTSVAKKTPKVTKSTKRAKKTPVAAKKREVTNVAKILKKTPIITKKPKTTANAAKRTSLKSEIKSICDIMRRSNCAGAMQYVPELTWLLFLRILDVRESHDAETAEALGNTFVPSLAAPYRWSDWANKNGAKRKKLVDGKLGAYFEFVNTVLIPHLKNLKDRPEASPRQKVISEILSGVERVRVDTEKNLLDILDKIDDISA

SEQ ID NO: 105393 - protein, 240 aa, Unknown
  Obtained from environmental sample
  misc_feature (1)..(240): Xaa is any amino acid
VNAGGVKRDEMRYNDTLVDTSWDGVWESAVADDDDGWTAEIKIPLTLLRIRPGGGTQTWGINFYRQDQGNVREYSRWECVPRGQSAFVSRFPLLVGIEGLEPRLRREFIPYASSQRKFETTETRFDDRKWTNRIGLDAHLGVTTSSQLDLTIWPDFGQVEVDQAVINLGTTETYFQEKRPFFLEGTDLFRVMGQDMFYSRRIGRGVPAPSPLDGEILLDAPRATDIALAAKYTAKMPTGL

SEQ ID NO: 105394 - protein, 272 aa, Unknown
  Obtained from environmental sample
  misc_feature (1)..(272): Xaa is any amino acid
KPALARGELRCIGATTLDEYRKHIEKDAALERRFQQIYTAEPSVEDTIAILRGLQERYEVHHGVRIKDEALVAAAMLSNRYITSRFLPDKAIDLVDEAASRLKMELDSRPTELDKLERKLLQLSIEKQALTREEDQASQSRLVKLEKEIADLSAERDAMNARWEKEKKDVQKIREIKQQIEELKIEETRYEREGNLTKAAEVKHGRIPEAQKRLKTLTDQMEGKSGGKEGKPALLREEVSEEDIARVVSVWTGIPVSKMLSGELQKYLERKR

SEQ ID NO: 105395 - protein, 199 aa, Unknown
  Obtained from environmental sample
  misc_feature (1)..(199): Xaa is any amino acid
MKEGTFPDNGYRDLIDLDSWAKYVLIQLVLDNFDFNSKTQQGGLTGSNFLYKVDSCSKIQAGPLWDFDLAAGVQNGGGGFGGFPPGGWGQPPGQGGGAAGFPAHYQSYQDPIAPTSENYSHAFYKRLWSDPVFKAKYKKLWDRHKSDFQNLSTLIDNIKSQVDGSITGKGTNTWANNSMMASGALTQQQWNTEVSGLKT

SEQ ID NO: 105396 - protein, 176 aa, Unknown
  Obtained from environmental sample
  DOMAIN (2)...(160): Polypeptide deformylase
  misc_feature (1)..(176): Xaa is any amino acid
MIRPILAFGHPNLRKKSDKITADYPELKTLIADMYETLDHAKGVGLAAIQVNVPVNVIVVNADPFKEDHPDLKGFRKTYINLEILEESGEEWVYNEGCLSVPTINEDISRKPVIKIEYNDENFVPHTETVSGMIARVLQHENDHLQGRVFTDNLSSLRRTLLRKKLDNISKGIISG

SEQ ID NO: 105397 - protein, 69 aa, Unknown
  Obtained from environmental sample
  misc_feature (1)..(69): Xaa is any amino acid
SKFIEPFVKKLAQTFPDIPIKRVDERFTSKMAFQSMIDRGLKKKDRQDKALIDKISATIMLQSYLEFGR

SEQ ID NO: 105398 - protein, 69 aa, Unknown
  Obtained from environmental sample
  misc_feature (1)..(69): Xaa is any amino acid
MICNFKLEADSITPEKLLSDDLQLDSLDMVDLILSLSDFVGEKVDPSLFKNARKVQDLVDSVYPLWKLK

SEQ ID NO: 105399 - protein, 134 aa, Unknown
  Obtained from environmental sample
  misc_feature (1)..(134): Xaa is any amino acid
MKILVLGGAGYLGGWLSARLLDEGHEVTVFDRLLHGPAAVAPLAGRPGFRLVEADMRDLGAVAEALPGQEAVVLLAALVGEPACARNPSAAVAVNYLASLAVWRAASYYGAGRFLFASTDSCYGAQENVLLTED

SEQ ID NO: 105400 - protein, 266 aa, Unknown
  Obtained from environmental sample
  misc_feature (1)..(266): Xaa is any amino acid
MLGVIALMRESKYRLYTASLALSVILNYYIGFFICVCAAITFLNQCVILKINHRDFLRKLALIAACSGLAIGLTAVLTVPAFFSLRDTYTAASKFPSGITWFSSYASVLGNFIAFTPPTTKEGLPNLYCGMISVLLMGMFIRSPKIPFREKITHLVTVIFLLLSCNMNVLDYIWNAFHYVNMIPFRFSFLLSFTMASMAYRTFLLKETMNRRDMLAMGICAAFFMLMAVIGSQKKEFIIGNAGLCVLYFVIWDISAEKKTGKIMTA

SEQ ID NO: 105401 - protein, 295 aa, Unknown
  Obtained from environmental sample
  misc_feature (1)..(295): Xaa is any amino acid
VAGQSSVLEVIRYALGIPIDDNDGDQRYKRELVARTLGSGGKAIIDATDRHGQPYQIRRILKENANVYIDGKLQPGVSIRETVLNKPLFFGQKELADNGKDSEMVLIEKLLGTSCDEIRCRIAEQKTKVTDTIGKLSKINNVEELIKEQIGAKSDAEHRLGFYKKHNLEEKLQKRLGFEKDIRKAEEGVALIESFVAGIRELLTNHEDDLRNFPGYPSTDNADYFKNFDAVFSQSIQSISAIKKEYEKNDAIFTKLKEERQKLIADRTNLRDEFAAIERMLAEELKTSEGQNISA

SEQ ID NO: 105402 - protein, 233 aa, Unknown
  Obtained from environmental sample
  misc_feature (1)..(233): Xaa is any amino acid
DGLTVADLDLDYFRDFFQRRFGESLDNQNQPLPRILENMNLLKEASLTVGSALLFAKTPQFKLPAFIVKAGAFDAVDISTTQYNDNRDIAGRLADVFRQTVGFVLSNLHHVQGDQGINSVGTPEISAESIEELVSNALIHRDYFISAPVRVFVFRDRVEIISPGHLPNNLTVENIKSGNSNARNPTLASFANHLLPYRGYGSGIIRALSKYPHIDFLDDREGNLFKVTLRRGV

SEQ ID NO: 105403 - protein, 85 aa, Unknown
  Obtained from environmental sample
  misc_feature (1)..(85): Xaa is any amino acid
MPDMDGMETTQRIRAMGDEDPYYKDVPVIALTADAVSGIKEMFLENGFNDFISKPIDTIKLNSVLEKWLPKEKQHGAVITGRKEG

SEQ ID NO: 105404 - protein, 206 aa, Unknown
  Obtained from environmental sample
  misc_feature (1)..(206): Xaa is any amino acid
MSKFVCPYCIRSYNLKKALYVCPDCGETAVPNSMEKEPIKCKKVGCGGLATQRKCPLCGQNLPRIALQTPNLPFSIVGVSNSGKTNYITVMLNEMQKTPGLRLALGHQNAETLNHQNENYKRIYEDHVPPESTAGGESIPQIWYIKNLLKKKGNNVPTYTFTIFDGAGEDHENRLDPSSAVCRYIQTSQAIIITLDPLILSTIRNS

SEQ ID NO: 105405 - protein, 244 aa, Unknown
  Obtained from environmental sample
  DOMAIN (1)...(244): Creatinine amidohydrolase
  misc_feature (1)..(244): Xaa is any amino acid
MLWEELTAKKFPNCIKESKGVCLLPIGVLEKHGNHLPVGTDMYTGQAVCKKAAEIESAVVFPYYFLGQISEARHYTGTIAASHRLMMDALREMCDEIHRNGFQKIIIVSSHGGNSYFLPFFAQEMPRLDRTYNVYTYFVGHIKEAQRQAICDFAKTKDLGSHAGLTETSVIMHLRPDLVDMGAQDPQEGRNLERLAQLRDKNVFTGFNWYADYPYHFAGDPSLSSPELGKMLVDMMSENVAEII

SEQ ID NO: 105406 - protein, 275 aa, Unknown
  Obtained from environmental sample
  DOMAIN (1)...(104): Response regulator receiver domain
  misc_feature (1)..(275): Xaa is any amino acid
KNIREGIAESFSLDGYEVITAADGKDAYAHFQKGDIDLVITDLRMPNLSGEELLTRIQADIPGIPVIVLTGHGSVAAAVEAMRNGAWDFLAKPVNLDHLAELVKHALANRELVLKHRRLEEELDRQKQFQSLIGKGAAMSRVFDMISRAAPARASILITGESGVGKELVADAIHGLSPRKDKALIKVHCAALATSLLESELFGHEKGAFTGAVSRTRGRFELAHEGTLFLDEIGEIDQNIQIKLLRVLQERKFERVGGEAGGGGGCPHRRGHKQK

SEQ ID NO: 105407 - protein, 94 aa, Unknown
  Obtained from environmental sample
  misc_feature (1)..(94): Xaa is any amino acid
MFPIVGKPLLQHHIEALALQGINQITLTVGYKADVIRNHFGDGKAFGVHIDYIVENEPLGTGGALALLPREDTLILLGDVYFDIDIEKFIRFTE

SEQ ID NO: 105408 - protein, 146 aa, Unknown
  Obtained from environmental sample
  misc_feature (1)..(146): Xaa is any amino acid
MNAMKVSIIRFPNVVGPRLTHGAVYDFIKKLRKNPKELEILGDGKQEKPYIYVADLIEAMLFLPFETGMNIYNAGVESATTVRKIADIVCEEMGLKGVEYKFTGGSIGWPGDVPKFQYDLSKIHSAGWKAKHTSDEAVRLAAKAVL

SEQ ID NO: 105409 - protein, 45 aa, Unknown
  Obtained from environmental sample
  misc_feature (1)..(45): Xaa is any amino acid
GDTDTTAAVTGAMAGLAYGIEDIPPHWLDTLAGHDDILRIAAAVT

SEQ ID NO: 105410 - protein, 75 aa, Unknown
  Obtained from environmental sample
  misc_feature (1)..(75): Xaa is any amino acid
MQSASQRVQATISVFLQPEEKELILPRPKNVQQLLKALGLGSCAALVAREGELLTPDRAIYSGNRILVRKVISSG

SEQ ID NO: 105411 - protein, 79 aa, Unknown
  Obtained from environmental sample
  misc_feature (1)..(79): Xaa is any amino acid
MEYHIRYDVAQEALVLLDQRLLPLREEFLLCRNTEDVVTALTAMAVRGAPAIGVTAAWGCVLAALEVGEGADAVLEQLL

SEQ ID NO: 105412 - protein, 147 aa, Unknown
  Obtained from environmental sample
  misc_feature (1)..(147): Xaa is any amino acid
MRSRMFLCMALLSALFASAAVSADEKRDDHPARRMWAELNLTADQEAQFKEINSRYAPSRRESAQRIEELREKINQEILRDKPSKSMLIQYAGTIGELQKKMSLASVSHLLEVKSVLTPEQFKTFVSMGPTTTGGKRGGGRRADGKA

SEQ ID NO: 105413 - protein, 123 aa, Unknown
  Obtained from environmental sample
  DOMAIN (5)...(123): Cytidylyltransferase
  misc_feature (1)..(123): Xaa is any amino acid
MLKAVFPGSFDPPTLGHLNIIERASLIFDELVVVVADNRQKKYLFSAEERAEMMKEIVKTAKNVRIASWDSLIVDFMKEENIKILIRGIRGMDDFSYEFELSMMNKAMHPNIETLFLTTESKY

SEQ ID NO: 105414 - protein, 180 aa, Unknown
  Obtained from environmental sample
  DOMAIN (42)...(173): NUDIX domain
  misc_feature (1)..(180): Xaa is any amino acid
VLDCSVFSIWESYCSPPEDGDNGTDSGGGKLHKFTVLDTRDWVMVIPVIESPEGKKFVMVWQWRHGSKSLSLEFPGGVFEPGENPEEAALRELREETGYKPEKMIKLGSLSPNPAIMSNTMHFFLAEGISGDGRQSLDEDEYVDVVLIDVNDVIKGIGKEPYIHALIGTALALYQSKEKK

SEQ ID NO: 105415 - protein, 288 aa, Unknown
  Obtained from environmental sample
  misc_feature (1)..(288): Xaa is any amino acid
GLRQQISTLKQDGGNEEYIKTLEDKAEVLDKSLMQSSAAFREFKAELDITWQKVRDSLQKNEAAIEFVSFRIYDKKWTDTVQYAALVLKKDSTAPVWVPLCNESELKEILDKAEGRSSEQQARILYNANGLALFETVWKPLEQELKGVTTIYYSPSGLFHKIAFNALPIDDSFNKRLMDKYNLNLVSSTSEVVHVSRNKKEKTQITSAVLYGGLDYNADATAMRTAAQSYKTKAVASAAASAPPQGVTRGAAWGPLPATRVEVQNIQGFLVRKKIANTLYQDSMGNEE

SEQ ID NO: 105416 - protein, 279 aa, Unknown
  Obtained from environmental sample
  DOMAIN (120)...(246): HD domain
  misc_feature (1)..(279): Xaa is any amino acid
TLKSNMNYNIEELRDKIKTIANLPTLPHIAARLMRTVNSSTASADTVAALVAQDISLSAKVLRLANSAFYGIPRSVNTINNAVIILGFKIIQTMVLSLTVFDMFAEKDKKASAPFDRDAFWDHSLRCAVIARLLAHKRKRNYALDPEEAFCAGLLHDIGKVVMEQYLNTDFHKALYHAQAKKIPIFEAEREVLGYTHCDVASWLTGSWSLPEEIEQPLVCHHEPEEATICADAVLVCHIADAMSKLNPENQEETDAALKTLEPLAKQLGLYTRDLTDVI

SEQ ID NO: 105417 - protein, 257 aa, Unknown
  Obtained from environmental sample
  misc_feature (1)..(257): Xaa is any amino acid
MPEVVSVYAGIGASSSRFGSGGAFNSTLGIKLVDKNKRTKSSEDFAAYVERYINSNFAGVKATVAADAMLAGGGGGGMNAPIQIVLQSSNRDSLLVFANTMLDTLGKINGIRNIKLSSDLGSPEVVVDIDREKMARMGLDLGSVGGTLQYAFAGDQTAKFLKGDYQYDINVRFDGFDRRSAEDVGNLTIMSQLGAPIKLKQIANITEGTGPNMMERYGRIPSIMLQGNIEGRSIGEIGDDIKAKLNEKLKGNHDITY

SEQ ID NO: 105418 - protein, 227 aa, Unknown
  Obtained from environmental sample
  DOMAIN (13)...(217): ATP-dependent protease La (LON) domain
  misc_feature (1)..(227): Xaa is any amino acid
MKPFGSSKTKVEEHPLLPLRELVIFPQTILSVFITYKSGIAAIEEALKRDLRLFAVCLKTAELSASGQKPEETWDAGTVVRIVQNLRLPDNTFRVVLQGEYRALLASLHPKNGFTMASVDPIKAESPDPLAHEKSDETAQEIAGLMRAVQKSFAQYAEFTKKIGTEIISAVEKTENPEKLVNIIANAISIKADRKIGLIRIADPASRLEKLLETLELENEIFGIKKI

SEQ ID NO: 105419 - protein, 211 aa, Unknown
  Obtained from environmental sample
  misc_feature (1)..(211): Xaa is any amino acid
MKNLAKQKGVIYVMDRGYVDYKSLYYIELQGSFFVTRMKSNCAFKRTHNKAHKEDGPVLTDVVIELTGAAAKKAYPEPLRKIKYKDKETKKVYEFLTNDMEREAEEIAAIYKERWEVELFFKWIKQHLKVKSFWGTSENAVYSQIWVALILTILIWINRTLDGITASPYELMIMMKSALLTKNSLVGLCTNIPYSKPTGNSVQPFLDGFKC

SEQ ID NO: 105420 - protein, 238 aa, Unknown
  Obtained from environmental sample
  DOMAIN (1)...(78): Bacterial flagellin N-terminus
  misc_feature (1)..(238): Xaa is any amino acid
MRELSVQSANDTNTDADRSELQAEVTQLRYEIDRIANTTEFNTKKLLEGSAKGVADEVVGTQRLNNNSRVALDSTKTKAMMAAVSNDKNWVFDGAYMLIKTNQTFQDGDATYCPSDYKLVGPDGTVYGFKELSADTKVKSTELEAGTIVADGGAVTKVKTVGAISAAFTTDPGQIVLGNAIGSHELANVTAGSILTSGSEFTILAGKSVNLVKSVTGVSNIEYTTEGELTLNITAGLD

SEQ ID NO: 105421 - protein, 300 aa, Unknown
  Obtained from environmental sample
  misc_feature (1)..(300): Xaa is any amino acid
YALIDKLGYKSVSANLESVASDLPALASEFSKWNGVDIVAAYYHPDLGLLIANPKVAEELANFGMLRKRELLVLYAGKGSTPADATCQKAAELAVKLFEGKKAKAPPDLLSGSFVVKKLKKAKEEGHEAAPAKGAKAAKGAAAKEAPARGRGRKALPAAPATAAPPTKTGKRAPKAARESAGRVAPPAVTAAAPAISKGPVRMTPMYSVVVANELFHNGNVEAWKRIVASYCAKYPALTVYIYYEGERILDINSLFKWGKVKHGSSIQFAVSGNDIKDVAKLQRYLVQGASKQLKRSCTA

SEQ ID NO: 105422 - protein, 191 aa, Unknown
  Obtained from environmental sample
  misc_feature (1)..(191): Xaa is any amino acid
MTNMIITTDPNGQIYYFNEPAAEVMGLGHDDLGRNLIDVFKKSITSKTLDTIVKSLESGNEIIGLEGIYNNGEKEMDYSLNVTPLKTPRGRKEGLTLLFSNQTRENELKQTVHQVSEEKRIIKNAFSRILSQKVIDQIIADPSQLKLGGEKRKMTAIFTDIQRFSTISSELHVQYGEDGPKTLVNLLNLYL

SEQ ID NO: 105423 - protein, 205 aa, Unknown
  Obtained from environmental sample
  DOMAIN (8)...(137): GTPase of unknown function
  misc_feature (1)..(205): Xaa is any amino acid
MLKQEHIRNFCIIAHIDHGKSTLADRILELTGLVSERERRDQYLDRMDLERERGITIKAQTVRIPYTRPDGAQYVLNLIDTPGHVDFHYEVSRSLAACDGALLVVDATQGVEAQTLANVYLALDHNHEIVPVLNKIDLPSADVGRVREEIEESIGLDCSSPLAVSAKTGFGVDEVLTAIVERLPAPAGDANAPLKALIFDSWYDS

SEQ ID NO: 105424 - protein, 293 aa, Unknown
  Obtained from environmental sample
  misc_feature (1)..(293): Xaa is any amino acid
DQQYFLKNESPTGLIKLTCNYGYLFSDNTKTVRGRFRSGTETVWFNVAWNDDYSISWTQPPLNNNTSYTFELVSQPKGGGAATSAVQASYAQATFEGNDTANNAEVLTNTAGSADAKGELIILTYNFRTSKFNTFGEKMGQLVVTNTSIKLESNYIITVLGDMTTLEGFDQSDIVGNRYTQNKPLIVVRSAMNDNYYLSTMAPLLYTNYPFSGAVTYARAANQSIVPNWGIVKDSWYNYGTTVYFPWVYALARTYSQDFQTARTQIAAASTAIRNTYQYILNTGFPLLPDGNY

SEQ ID NO: 105425 - protein, 264 aa, Unknown
  Obtained from environmental sample
  misc_feature (1)..(264): Xaa is any amino acid
MSEHHGAGHPGGHPGGHPGINPGGKHGGKHGGMFGGSLPQATSILDPQVDRDRRHKPHTLILTGRGRYEDLWHDFAATSHRVAVALDGFISPAGAGVEVRSTVPGALDDIDEFVLVILNLSRSVPGYGTIDEAFDGGTADLISRLVAWARAGGSILALHATALAAEAYPELQPIIGGNWVEGVSGHPPIGEATLHITSEAHRVTAGQEDIRTYDERYCRLTVNEDVTVLGTVRDDDGIDHPALWLNEAHGGRTIYSALRTHARS

SEQ ID NO: 105426 - protein, 275 aa, Unknown
  Obtained from environmental sample
  misc_feature (1)..(275): Xaa is any amino acid
LNEIVTTPLVESLKRDMNRYDESQTGLAGLYLAGTYALLQKTTDATLLLGKIKRAMAKDNSFRYIDELMYHSIYLNIISRHFPQRLRDISESLLVDMAQQMERQSYTTISANHALMAIDAYLKVVPTAETGRYTVQEVSKDNQRKELKPAGTTLFSVPFSANAAKIALENKDSLNLFYQITAAGFDREVTSKETKNGIEVYREFLDSSGKTVSSFKVGDVITVKLNFRSLSNTEYRDVAIVDLCPAGLETEIESARQASNQSSRDAGAPIMLTSA

SEQ ID NO: 105427 - protein, 118 aa, Unknown
  Obtained from environmental sample
  misc_feature (1)..(118): Xaa is any amino acid
MDAKQAIIETRTYLGIELGSTRIKAVLIDTDYAPIATGIHDWENRLEDGVWTYHLEDVWAGLRDCFSKLILDVKNRYGLTLSSVGAIGVSAMMHGYLVFDKNGDQLVPFRTWRNTITE

SEQ ID NO: 105428 - protein, 281 aa, Unknown
  Obtained from environmental sample
  DOMAIN (139)...(279): Plasmid pRiA4b ORF-3-like protein
  misc_feature (1)..(281): Xaa is any amino acid
MKDKEWNYIADYVEDTIDELKERYTLFLDQGMGPIRQRVGELHAAVVELAARLQKGEIDISWLPKHTFIMLSQIQGHAAHLLEDLDTSEAPPESELEAMDSSLDGMIDTFTDIKEMIDYDMNSFRRSNLTLVRGNEGDVSDVWRTMQICIGGTDVWRRVLVPREWKLEELHKLIQITLDWNDTSRHRFFLEGSGKSGLELLDDKMKVLEICDRGISELQYEYGSKWNIKVIILSPYQPEKKEIIRCVAGEGASPPENIGGPLRFRKILNALKEAVKRRNRR

SEQ ID NO: 105429 - protein, 234 aa, Unknown
  Obtained from environmental sample
  DOMAIN (43)...(211): Penicillin-binding Protein dimerisation domain
  misc_feature (1)..(234): Xaa is any amino acid
MNSLPKRRFLFAVSALFAAVLYILIRYAMKIEPGNSGNTDGPKTAIERGPIVDRNGKILAGQVRRYDIYIIPPKERNQNRQNEKIDNLANRLAPVLEMDEEEIRQRISASKKDFVIKRYVTPEAYNIIKTMQEEKGRPLAGVIARPVPFRVYPEKSLASQIIGFVGAEYQGQEGIEYALNDELAGKENSGSGSKVELTIDANIQYILEKVAGSTLRETRAESVIFLAMDPRNGE

SEQ ID NO: 105430 - protein, 247 aa, Unknown
  Obtained from environmental sample
  DOMAIN (158)...(241): Fibronectin type III domain
  misc_feature (1)..(247): Xaa is any amino acid
ATSYNIEVSTTSTGTWSSLTTVSGTSYTHTGLSANTQRWYRVFAVNSAGKSSASSIVNTTTQSVENTNAPSAPINVTATAQSTSSIKISWSSVAGATSYNIEVRTTETGTWSSLTTVSGTSYTHTGLSAKTQRWYRVFAINSAGTSSASSTVEATTNPPAPTTAPTVSSSIASQQQQITFSWSAVTNATSYEYQWRRATDTNWYSARETTSSHQVINTGGPRVEYQFRVRAKNVTGTGPWGTKNVTM

SEQ ID NO: 105431 - protein, 244 aa, Unknown
  Obtained from environmental sample
  misc_feature (1)..(244): Xaa is any amino acid
MRQIIRINTTNELSQMLEIKRIKLETYVKSEITIVRKMGDSPLIRDYFIHPSDENLRKQAFKEIASYRGAFDHKSVFWVNDVDKIFHIDDTAPYTVDPKSPDNYWYWMTLYRTESYNININYNPDIDKIRLWVNAPVFNDNQKPIGMVGTGLDLSEFVHALFDDVDDRMEFYFFNGDGEITGARDIELISTKMKIEDKMTAVNGGILAVAQSLMPGEARALAMPNGNLVISTIPQLTWYSIVSM

SEQ ID NO: 105432 - protein, 128 aa, Unknown
  Obtained from environmental sample
  DOMAIN (2)...(128): Protein-L-isoaspartate(D-aspartate) O-methyltransferase (PCMT)
  misc_feature (1)..(128): Xaa is any amino acid
MVSEQLKARNIKSEAVLQAMRSVPRHLFVPENLQKHAYDDSPLPIGLGQTISQPYIVAYMSEYLQPYKGMKVLEIGTGSGYQSAILSYLGCEVFTVELLKELADRAEKIFKALNLSNIKTKCANGYSG

SEQ ID NO: 105433 - protein, 278 aa, Unknown
  Obtained from environmental sample
  misc_feature (1)..(278): Xaa is any amino acid
GPGIGFIPDSVIRSLGVPLVTGDIPGVAVIIGEASDPTVLADIVKDYQTKGLLSFLVGKVIDQAAERKVKMGLEFRVVPLGRDITAVSHVITVAIRTALIFGGIKESKLSDLLRYTKERVPAFVNTFGPLDEVTVAAGAGAISMGFPVISDWKTIASIAIPGSLEHAANKEIMIKRSLELRNIKVKANKIQIPVLFASAFEGELIRKNDMAVEFSHSHNTTCELLVMKDPASIEDHKITIIGNDIDGIKTYPANMDLALYVEVSGAQMKTDFEPVIER

SEQ ID NO: 105434 - protein, 245 aa, Unknown
  Obtained from environmental sample
  misc_feature (1)..(245): Xaa is any amino acid
MMLQTPDWNPTIMEDAGITTDNVSQIAELLLDYTQLYKESFSREKQYVHAVCYIKGLLSDLARKSVEPIALRYAETEKEVRNMQYFTQQGAWDDGLMLEIYQKQLSDTIADKKAEPDAMLTVDGSCIPKKGRESVGVARQYCGRLGKVDNCQEGVFIGYTSDKGYGLIQTRLYMPEKWFEPDYKERKEKCGVPDEIKFQTKPEIASDMLQVIISSGLFPARWVGVDSGYGSDQTFLDNLPEGMLY

SEQ ID NO: 105435 - protein, 284 aa, Unknown
  Obtained from environmental sample
  misc_feature (1)..(284): Xaa is any amino acid
AHIIEVVNSYFRTAATKQREVEAAFKHLENQLAKPPYLYTMDQILKFTGPGGGLLLGQYSSEELSEWMKKKITESENNELPALLIINVKTRDEQYFLLKEKMMPLCARLLHDAKILIRREITKLWSRLISDFKTDLAMTSDGEFERLLARCAEKLCPELISLLSDPKFLLIYQELDHRENGIPAAMRIIYEGKLLPYSSVFLIRRKAMLQEARLLLPFWFSLPIVSGLIGLFKDLFNKKEKKAVKQFAGEQLVVEDKSHAGKVRTAAEEIEFDIVPPGYTIDSY

SEQ ID NO: 105436 - protein, 263 aa, Unknown
  Obtained from environmental sample
  DOMAIN (1)...(191): Cellulase (glycosyl hydrolase family 5)
  misc_feature (1)..(263): Xaa is any amino acid
VVDAAIAKGIYVIIDWHSHNAHTHTNDAKAFFEEMARLYKDVPNVLYEIYNEPTGTTAAAWTNDIRPYAQTVVNAIRAIDDKNVIIIGTPNWCASPEIATTEAAAVDGVNLVYTVHFYSAYNPHKEPLRTKVKTSLNTHNKAVFVSEFGVCMNTGKEPLDLAEATTWLNFLDENNVSWVNWSVTYKDEGASALKPAVRKYDGNWTPDDLTTSGAYIRGKMIEAYNREENSTATFVTDLVIPNTPKTTESAAIAPAAVPSTAFS

SEQ ID NO: 105437 - protein, 305 aa, Unknown
  Obtained from environmental sample
  DOMAIN (7)...(88): Cation transporter/ATPase, N-terminus
  misc_feature (1)..(305): Xaa is any amino acid
MPSSRTERARKRLLRAASRDGDTLLIQYDNSAAGYDEDDVEEMRDEHGVNVITRHTEDSLLKRFVGAFINPFTIVLFVLAAVSFFTDVIWAEVGESDFTAVIIIMTMVIVSGMLRFFQELRSDNAAKRLTEMVETTVCTARKFKDKESGETFSRKQEIPMDEVVVGDVVHLAAGDMVPADVRIIQAKDLFVSQSSLTGESEPVEKFAGSIARTNTSPLALNNLAFMGTNVISGSAVALVITVGDDTILGSIAQQLQVKAPPTSFEKGVSSVSWVLIRFMLVMVPIVLLVNGFTKGTGCRLSLCSF

SEQ ID NO: 105438 - protein, 62 aa, Unknown
  Obtained from environmental sample
  misc_feature (1)..(62): Xaa is any amino acid
ERARREEAVRQEALLHAEEEGMDVSISVEERTRLELQESVMNMAKEHPEDAAQLIRTWLLEE

SEQ ID NO: 105439 - protein, 228 aa, Unknown
  Obtained from environmental sample
  misc_feature (1)..(228): Xaa is any amino acid
MEAAMHVLGFTPQGSEGIIIRVEADIRRGIPGIDITGLAEGAVREARERVRASFRNSGFSFPQDRILINLAPAGLRKEEASLDLPIAVSVMAAAGMIAVPDNMMVLGELELSGRVRPVRGALAALSSALAAGISEFIVPLENSSEATVLSGIRFFAAATLAEVFHALLVRSETGELPANGPALAGGLRGDSTTGSENSGENGCEIWTGDFSEVQGQKRYKRALKSQPP

SEQ ID NO: 105440 - protein, 220 aa, Unknown
  Obtained from environmental sample
  misc_feature (1)..(220): Xaa is any amino acid
VAQGGMVQHVTYPDSFMDQQETTITQITTLATDPLMKAIVVMNSVPGTAEAFRRIRERRPDIMLFAGEPHEDPLVIQGAADLAISCDFINRGYTIPWAAKQLGADTFVHISFPRHMSYESLGLRRQIFEAACADLGMRFVFVTAPDPTSDVGVAGAQQYILEQTPQWINQYGKNSVFFCTNDAHTEPLLRQLIEYGGMFVEADLPSPLMGYPGALGVDLS

SEQ ID NO: 105441 - protein, 181 aa, Unknown
  Obtained from environmental sample
  misc_feature (1)..(181): Xaa is any amino acid
AQEYYNVLADIVTYGKIIGGGMPLGAYGGRKEIMELVAPNGPVYQAGTLSGNPIAMAAGLAQLEALEQQNVYAHIDRLCEKLAKGLLEIAQNCGIKSCVNRIGSLCCIFFGIENACDYKSVKKADTELYAKYFRGMLCETIYLAPSQFEAMFVSYAHTENDIDRTLDCAERVFSTLPLCPR

SEQ ID NO: 105442 - protein, 89 aa, Unknown
  Obtained from environmental sample
  misc_feature (1)..(89): Xaa is any amino acid
MREPVYLLWDKAHIWGLTAWWALASMGVPHRLLKAASIAQGALSGKPSSVLLVPGGTARLKSKALGAAGRAAIRAYIADGGHYLGFAAA

SEQ ID NO: 105443 - protein, 153 aa, Unknown
  Obtained from environmental sample
  misc_feature (1)..(153): Xaa is any amino acid
MAEDALPKGYEPHETERRWREYWENSRAFTPDPDGPGEPYAIVIPPPNVTGALHIGHALNITLQDVLCRFARQKGKKVLWLPGTDHAGIATQNVVERALALEGKGRHDLGREAFVERVWQWKKEFGGRILSQIRRLGASVDWTRERFTMDEGL

SEQ ID NO: 105444 - protein, 273 aa, Unknown
  Obtained from environmental sample
  misc_feature (1)..(273): Xaa is any amino acid
VTGLGTKTIDNVRTVLDSAYNYGIVVSLCLFSFDLLDVDPKKPNKTEAQLTVNEKFLTVPENLDSYIEKGLKPLLDAVGNHPAIMCWEVFNEPEGMSSDAGGWSTKKIEMKHILRFTARIAAVVHDKTLKMASTGIHEYGKMKTWYSDSKLKTAAGNDPLASKAYLDFYMAHYYPEYIGTSGSPFHNPASFWGMDRPILIGEFPAQSWGNGSGYGSIQSGTAMTITAAYEYAYNNGYCGALSWSMTEGNPNKFGSFNTTKPALDNLSSQHKAD

SEQ ID NO: 105445 - protein, 93 aa, Unknown
  Obtained from environmental sample
  misc_feature (1)..(93): Xaa is any amino acid
MLQTQSVGKSLWNTLKTLQQKELFKNYFLVGGTALSLQLGHRISNDIDLFTRDDLNKDEILDFLNRDYGGVYQIHNIQNTILQISIDGVKVDL

SEQ ID NO: 105446 - protein, 91 aa, Unknown
  Obtained from environmental sample
  misc_feature (1)..(91): Xaa is any amino acid
MTNTNTVTLSEDFFCALGKLSTEHQKIVFKKLQMLRIDPFYPSLRTKKLKGNQDERFESSVNMDIRLIWRFDGERIILVLDVGHHDVLKKY

SEQ ID NO: 105447 - protein, 119 aa, Unknown
  Obtained from environmental sample
  misc_feature (1)..(119): Xaa is any amino acid
VLVSSIPAFAVQYQAKDATLGGDATISGDYVQMKGGDLTFNSVSVSQAEMYDIRINYKQDYDEIKKQKLVVNGEEVGEVAFPRIATWTDVVAVVRLKSGNNTVAILNSWGWVDIKYIDV

SEQ ID NO: 105448 - protein, 268 aa, Unknown
  Obtained from environmental sample
  misc_feature (1)..(268): Xaa is any amino acid
IVTKDPKYRIRHLLLTRKPYGSTEVNAPQKHSRADSGRCENGELIACFDVVLDKKGDLESYSVIGEKDSAYGFKLYAYAETALPSPWFNNQTYVNTLDKDGIREFIRLTHDAFNKSFGKDFGGVIPAIFTDEPQFTRMGTLNFAREEKDVTLPWTTDIEDTFKATYNGESLIGALPELLWDLSEGKVSTIRYHYHDHVAERFTAAFADQCGDWCGEHGIMLTGHMMEEPTLESQSAALGDAMRSYRSFQFPGIDMLCDRREYTTAKQA

SEQ ID NO: 105449 - protein, 68 aa, Unknown
  Obtained from environmental sample
  misc_feature (1)..(68): Xaa is any amino acid
MKTATIWNGVRAVFTAFGGWLGWALGGLDGFLNALLLFMALDYISGVLCAAVDKKLSSEVGFRGIAKK

SEQ ID NO: 105450 - protein, 275 aa, Unknown
  Obtained from environmental sample
  misc_feature (1)..(275): Xaa is any amino acid
FLDSLIGSDGADGSDGKSAYQLWLDAGNSGTAQDFLNSLVGTDGADGTDGVDGKSAYQLWLDAGNSGTAQDFLDSLIGTDGVDGTDGQNGVGVPTGGTAGQVLTKTSGADFDTAWSTLADVDGNLFKSVQTYGDLPQPATDYAGKLYFVQEGSGGALSFMGVYKYPRGFYAVNTEDDWEQAPLNVSVSEDTLTVVNITDWASFCAVVGDVGVGDVLLYNGVMYKNLTGSLTAVTPDADTTNWKPLLDDTCFQQRAEPLTGDFARSKSSFAQLLAS

SEQ ID NO: 105451 - protein, 280 aa, Unknown
  Obtained from environmental sample
  misc_feature (1)..(280): Xaa is any amino acid
KNIVVIMLDRAVSVFIPFIFEESPELKDTYSGFTFYPNTVSFNGYTSIGAPPVYGGYEYTPQEINKRVNIPLVEKHNQSLIMLPRIFHENGFSACVTDPPYANYNWKSDLSIFDDYPGIKAYITDSKYTNLWLIKHNLQLPKTGDIIKRNMFWYSLFKGLPLFFRQPIYMDGNWCSPISNNSLRRTLNGYAVLDFLPNLTEITDNNINTALIMTNNTTHENSFLQAPDYTPTITVTNYGDTRFAKEYSYHINAAAIKRLADWFELLKRENVYDNTNIILV

SEQ ID NO: 105452 - protein, 280 aa, Unknown
  Obtained from environmental sample
  misc_feature (1)..(280): Xaa is any amino acid
LFVFPTNVAASRWADRLLRLRQGGTIAMEKFIAWDTFKQNSIRSKINNRQSVPAVLRKMFISALIRENAELCGQGKTPVFSSLIQAEWAQSADSFAGWLTEILPQLGAWFRQTTGLPITQIEDVSAAQRAQAFTGDDGGINNDLFTLALRYTQFLARRGLFEPAWETPPFEDGGKECFIFFPESLSDFSEYRELLAASGHVKIINADDAEVQRQPCDVFFYANSRGEITEAALYILALRKNQNIPWDSISVSIPDDAHYGPYLLREFANRNIPCVKHSGK

SEQ ID NO: 105453 - protein, 221 aa, Unknown
  Obtained from environmental sample
  DOMAIN (27)...(102): OB-fold nucleic acid binding domain
  misc_feature (1)..(221): Xaa is any amino acid
MDTSGKLTVSALTELIRETLEGSFPTVVVEGELSNFRPSSTGHLYFTLKDSGASISAIMFRNRIRSLSFEPKDGMLLRVRGSLSVYAQRGTYSIVIEEMERAGEGDILAMLEERKRKLAAEGLFNEERKRPIPRFPETVGVVSSPTGAAVRDILNILKRRARGIRVVILPTLVQGADAGEAIARRIRQANFWKLADVLIVGRGGGSLEDLLPFSDEAGFAQ

SEQ ID NO: 105454 - protein, 282 aa, Unknown
  Obtained from environmental sample
  misc_feature (1)..(282): Xaa is any amino acid
GNLIQVLPADAFARFCRLKGYETLYVCGTDEYGTATENKAAEEGLSPKELCDRYHAIHADIYRWFNIDFDKFGRTSTPIQTEVTQEIFTKLDKAGYICERTIEQFYCAKCGRFLADRYIRGICPKCGSAKARGDQCEDCQKLLDPTDLKEPQCSACGSSPTLEKTNHLYIDLPAIKEKLEAWIKAASQKGFWANNAVQMTHAWIRDGLKERAITRDLKWGIPVPKPGYEKKVFYVWFDAPIGYISITGNLGEEKSKSGWRDFVNYWWKSPDDVELFQFIGKD

SEQ ID NO: 105455 - protein, 237 aa, Unknown
  Obtained from environmental sample
  misc_feature (1)..(237): Xaa is any amino acid
VQRAQYGTQGTGEEETKLRPIGSDRAERPGQPRQLGRPEGADRIGAGGATDDTPSRAGRIDPSRARETREQDQTRGRTTATATIGRGKATQTDGANGTGKGTDKANGSPDAAGGKKAPSGDSMELSPEAKKMLEELKARDKLVRAHEAAHLAAGAGITKGGAQFTTQRGPDGNMYAVGGEVPIDAGAVPGDPRATLAKAQQISAAALAPADPSPQDRAVAAQARQMAAHASAEMMRN

SEQ ID NO: 105456 - protein, 205 aa, Unknown
  Obtained from environmental sample
  DOMAIN (24)...(199): CobQ/CobB/MinD/ParA nucleotide binding domain
  misc_feature (1)..(205): Xaa is any amino acid
MTGAEMTEHWGAEMPGPFAGTRVLAITSGKGGVGKTNVVAGLAISLAKMGQRAVVLDADFGLANLDILLGLSPQYTLEHVLKGDKVLEEIIVEGPCGIRVIPASSGINELTRLDPAQELRLVQGLQRIAMDTDWLLIDTAAGIHDSVVKLLMAAQEIILVGTPEPTSLIDAYAMVKVVTSRDQAKPLWLLVNNAQGEEEAMETIE

SEQ ID NO: 105457 - protein, 287 aa, Unknown
  Obtained from environmental sample
  DOMAIN (96)...(166): HAMP domain
  misc_feature (1)..(287): Xaa is any amino acid
EEEKDLEKLFEQSVDDHGNTAYNVASISAFQDDAIRYLLQKTLESGSQSGLIKYRNQNYMSSLIPVTIGDGLELFISIFIPENDIVGGVRQNMRNVTIFSVFILLIVLIVSTFFSQAIAKPMQSLSEQMSRIKSFDLDSQVAIRTNLVEIGEMQDSFENMRNGLKSFRRYVPADLVAQLINQSITADLGGEQRDLTVFFSDIAKFTSIAEKMNPDRLVLDLCVYFETISKTISENKGTIDKYIGDSVMAFWGAPVPMEDHAEKACRSAIMIRDNLHTLFRQGRIREN

SEQ ID NO: 105458 - protein, 106 aa, Unknown
  Obtained from environmental sample
  DOMAIN (6)...(106): Endoribonuclease L-PSP
  misc_feature (1)..(106): Xaa is any amino acid
MEIVQTHAAPAAIGPYSQGIAVGGLLFTAGQIPLDPATMKIVEGGIEEQTAQVLKNLDAILGQAKTSWDKVAKTTVYLTDLNDFATFNSIYEQHLKGAKPARSTVQ

SEQ ID NO: 105459 - protein, 248 aa, Unknown
  Obtained from environmental sample
  DOMAIN (1)...(228): SNF2 family N-terminal domain
  misc_feature (1)..(248): Xaa is any amino acid
VCPTSLLGNWEREIKHFAPTLPFFVHHGNNRQDLPKQFDPHALVLTTYGVVRREEEAFSARQWGMVVVDEAQAIKNSSSAQSKSVRRLHAPFKLALTGTPIENRLTELWSIMAFALPGYLHYEATFKERFSTPIEKYRDPDAAAELRARVGPFVLRRLKTDKSIIHDLPEKQEMKIFTQLTREQANLYQARVQQMEKDLAESSGIERRGRILALLTHLKQICNHPSHFLKEPGPYKGRSGKMERLTDM

SEQ ID NO: 105460 - protein, 157 aa, Unknown
  Obtained from environmental sample
  misc_feature (1)..(157): Xaa is any amino acid
MKKLRKLKGGRRLNRSYGGDAFIYFILAVFGIFFVFPLVFTINHAFKPLNEIFLFPPNIFVRRPTINNFQDLFVIMSKSWVTFSRYIFNTVFVTAVGTAGLIIIASMGAFVISKYRFPGAKLFFSGVIITLMFSGYVTAIPNYLVMAKLGWVDTYLA

SEQ ID NO: 105461 - protein, 261 aa, Unknown
  Obtained from environmental sample
  DOMAIN (1)...(133): E1-E2 ATPase
  misc_feature (1)..(261): Xaa is any amino acid
VEKDAGDTVYAGSINESGSFEFRVTAGAGDSMLARIIKRVEEAQGSRAPMQSFVDRFAGMYTPAVFLFAAAVAILPPLFMVGPWSEWIYTALVLLVIGCPCALVISTPVSIVSALATAARHGILIKGGLFLEQGRKLRCLALDKTGTLTHGTPRQTDFVDMQSVAGADTRALAAGLAVRSDHPLSRAIAADAAEHGIVPPEVADFAAIPGRGVSGVIGGAKWYLGNHRLVEELNVRSPRTAEHIVALERQGKSVVALIGDA

SEQ ID NO: 105462 - protein, 82 aa, Unknown
  Obtained from environmental sample
  misc_feature (1)..(82): Xaa is any amino acid
ASGAVFGVLLAFGMMFPNTQLMLLFPPIPVKAKWLVIIYGAIELALGFYNPGSSVAHFAHVGGMIFGFFLIRYWQKNARNFY

SEQ ID NO: 105463 - protein, 263 aa, Unknown
  Obtained from environmental sample
  misc_feature (1)..(263): Xaa is any amino acid
ASSTFTIPDSVTSIEGYAFFECTGLASVTIGNSVTSIEEAGFRGCTSLVSVTIPASVTSIGDHAFYGCDSLAAFDVNSANSAYSSVDGVLYDKDKTILIQYPRGKTGSTFTIPASVTGIGGYAFWNCTDLASITIPNGVTGIGKDAFYYCRSLASITIPDSVTSIGEGAFGCTSLASITIPNGVTSIEYATFWFCTSLASVTIGNKVASISKDAFSGCRNLASITFVGTIPSSGFNANAFYELGDLRDKYYATDADNGTPGTY

SEQ ID NO: 105464 - protein, 93 aa, Unknown
  Obtained from environmental sample
  misc_feature (1)..(93): Xaa is any amino acid
MKVLLINGSPHKDGCTFTALSEVAGALEKNGIAAEIVHIGAKPMIGCVACGKCKRDEGCVIDDAVNEVAKKLKECDGVVFGSPGILRLGEWKL

SEQ ID NO: 105465 - protein, 136 aa, Unknown
  Obtained from environmental sample
  misc_feature (1)..(136): Xaa is any amino acid
MSNEKLALLGDEAIALGAIHAGVSAAYGYPGTPSTEILQYLIDEYAKNQSGPVASWCSNEKTALEAALGVSFAGRRALVTMKHVGLNVASDPFINAALLKIKGGLVVAVADDPGMHSSQNEQDSRFYASFAMVSCL

SEQ ID NO: 105466 - protein, 298 aa, Unknown
  Obtained from environmental sample
  misc_feature (1)..(298): Xaa is any amino acid
GAPEETIERQVEEHRQAVIKIEEARAANLARDAEYVNKLLEKAVEQAGKRADKMEEAALAKLKEQAEDRILKLKTAEEERLRTYQESAKARIVEVQALVKSIKEEWRTERGEWEAKDKAVRDERKQDLETFAASFEASKKQIEDFSARVNGIVSSQENMLHRAAEETKQALVKSIKEEWRTERSEWEAKDKAARDERRKDLETFAASFDASKKQMEDFSAHVNEIISSQEALLVKEAEQMKQTLIKNMREEWHTERSEWEAKDNAVRDERKKDMETLTATLDASKRQIEDYSAHVNEI

SEQ ID NO: 105467 - protein, 252 aa, Unknown
  Obtained from environmental sample
  misc_feature (1)..(252): Xaa is any amino acid
MLAGFGSSEDSTRLREIKPRIRLDKIEGKIGALEGTAILLYTSGGVIANRGLYSLRLSDGTKIGELDEEFVWERRIGDCFDFGARGWRIKNITAESVEVTPLDNTADYIPFWKGDIPFRSINLTNRILGILENFNNKGGIKTHLSSPAHESLKDFLKSQRTSQQGLPLPDTKNFIVEIVKGTELNRNFYSVILHNFRGGQVNYPLSLALSSEMEETIGLRVESFPSDNNILFLLPRLGLDDALSSPEEIFRR

SEQ ID NO: 105468 - protein, 252 aa, Unknown
  Obtained from environmental sample
  DOMAIN (71)...(232): DHH family
  misc_feature (1)..(252): Xaa is any amino acid
MAWVKRDIDKKLVKTISEKYSCDPLTAYILVNRGITTDTEIKCFLTDDSGLLCDPFMLPGITEAIRRIRQAKANKEKILIFGDRDVDGITGTVLLADYLQCLGITVLWRIPVGDEPYGLSMQAVENFSNEGGSLIITVDCGISNNAEIDRAAELGIDVIVTDHHLPKDVLPKAVTIVNPKLPGSAYPFPDLAGCMIAYKLILALQTALGGEGIPNFAKLDNCYIQLAALGTVADIVTLQNENRIIVRRGLQA

SEQ ID NO: 105469 - protein, 267 aa, Unknown
  Obtained from environmental sample
  DOMAIN (1)...(265): Delta-aminolevulinic acid dehydratase
  misc_feature (1)..(267): Xaa is any amino acid
VSKGVDAALNAGVRSFLLFGVPEAGAKDENGSGAYDDDGVVQQALGNIKKTFGDDACLITDVCLCEYTAHGHCGLIRDGGVDNDATLPLLSRTALTHARAGGDMVAPSAMMDGAVAAIRGALDANGFTETPIMSYAAKYASAFYGPFREAAGSVPQFGDRKAYQMDYHNSNEALKRIEIDIDEGADIVIVKPALPCLDIISLASRLVKVPIAGYSVSGEYAMIKAGAAGGFIDEYKVMCESAVSVFRAGVGILITYFAKELAGAIKG

SEQ ID NO: 105470 - protein, 155 aa, Unknown
  Obtained from environmental sample
  misc_feature (1)..(155): Xaa is any amino acid
MNKVLKKFVEKQAKLDDGSIINYAEGPNTGKALLLIHGQTGAWKDYITVLPELSKKWHIFAVDCYGHGYSSHDNSKYYLDKNGNDLIWFIRNVIGKETLVSGHSSGGLLAAYVAAYGIDLIVGAVLEDPPVFSTEKGNFEKKFAYLDTYKPMHEY

SEQ ID NO: 105471 - protein, 178 aa, Unknown
  Obtained from environmental sample
  misc_feature (1)..(178): Xaa is any amino acid
KDNTDAIPLYTNFAAGWTMGAWDAYIGGSATGDADFMNQKLPREKDPFSNRGNGTGPYAVFYILYESVARGLVEKDPSTTDWESCKGRINRGEIATLVLGSWAIVQMQEAGPNPQDIGYMTFPITVNGKQYASAGADYCYGVNKNSSRDVRLASLLYIKYLIDKSNFDYDQGGIPTVK

SEQ ID NO: 105472 - protein, 264 aa, Unknown
  Obtained from environmental sample
  DOMAIN (29)...(256): Caspase domain
  misc_feature (1)..(264): Xaa is any amino acid
MNVSRILATALIVLTAVTTAMAATTPVRRYLLSAGANNGGSDRVLLRYAVSDANAFAAVLTDMGGVESRNAVILSDPSVRELIGSIAKLGKLIAKDKALQPNVRGEVFVYYSGHADEGGLKLGSETLRWSEFRSAVSGLGADVRVAVIDACGSGAITRTKGGTARPAFLSDASSNMKGYAFLTSSNENEASQESDRIKSSYFTHALLSGMRGAADMTGDGKVTINEAYQYAFNETLQNTQNTSAGTQHPSRDMNLAGTGRRRDD

SEQ ID NO: 105473 - protein, 147 aa, Unknown
  Obtained from environmental sample
  misc_feature (1)..(147): Xaa is any amino acid
MVKFYRRALNKIDKLDAGQRKELLVSAIGEINLLETVMDSMDVGILVCDAKNNLVMANKFAQRLFPMNLGEGVELWSALKDEKIVGFFKNILLNREKVNGYEIDIEQSERKKLLSINVVPLVQEKRITGSLIYIEDITEKRRGEVRL

SEQ ID NO: 105474 - protein, 290 aa, Unknown
  Obtained from environmental sample
  DOMAIN (52)...(283): Spermine/spermidine synthase
  misc_feature (1)..(290): Xaa is any amino acid
IDLILGLIVLFKFFPSYRKDFAFIAICILAFLPCLFINFSPDRITSGIFRSYRLLNENEKIDVRNGKTATISLHEGEGNFYVKTNGKADASLVKNRNKPIEGDELTQAATAFMPMAMRNAPYVAAMVGLGSGMGSHYLLADPLLERLDCIEIEEEMVKLAKKGFYPYNHRSFDDPRMFLHIGDARTFFHTQNLSYDLIISVPSNPWVSGVASLFSLEFYHHVKRYLKPGGQIVQWLQLYEFNNELLLHIIRALGESFKYVSVYHAPEEPDVIMIASDEPVFQKYIDRFKQ

SEQ ID NO: 105475 - protein, 97 aa, Unknown
  Obtained from environmental sample
  misc_feature (1)..(97): Xaa is any amino acid
MKVIYKIIYPNGKIYVGKDSTGNILRYFGSPETDIDKDFTWEQLQDVTIRKKILFSSEDISESELTKKENEFIVKCCANNPDIGYNLLPKFDPQAVQ

SEQ ID NO: 105476 - protein, 185 aa, Unknown
  Obtained from environmental sample
  misc_feature (1)..(185): Xaa is any amino acid
MYFNNNIGYGTSTSHETRNGQNHIETSESTYNSETYSYTSTSTTTRNYDSAGRILDESNSSSTTTADGTSTSKSEISNEYDAETGLLSMYKKNETSTSTSGTTTTTSSVQNYTILLLSDNDGIRTYKRYLNEVINNGTSVDVSGQGYQEYKIQNGKTIEEKYFTKDGVLNSTTIITLSDNEVIRA

SEQ ID NO: 105477 - protein, 64 aa, Unknown
  Obtained from environmental sample
  misc_feature (1)..(64): Xaa is any amino acid
KDNPEKTAPELTAPERTIPELTAPERTIPELTAPERTIPELTIPERMAPVQAAATMAAPQDDGV

SEQ ID NO: 105478 - protein, 261 aa, Unknown
  Obtained from environmental sample
  DOMAIN (63)...(261): RNA polymerase Rpb2, domain 6
  misc_feature (1)..(261): Xaa is any amino acid
MDVSPKQIISVSASLIPFLEHDDANRALMGSNMQRQAVPLVFPEAPRVGTGMEGKCAYDSGVLVKARRGGTVIRVTSQEILIKPDKTGGKSSPQALIDDDGNDLYKLAKFQRTNQDTCYNQRPIVKLGDKITSGQVIADGPATQNGELALGRNILVGFMPWNGYNYEDSILISQRVVKDDMFTSIHIKEFIVEVRETKLGKEKITKDIPNISEKSLDNLDSEGIIRVGAKVRYGDILVGKVTPKSETETTPEFQLLNFIFG

SEQ ID NO: 105479 - protein, 295 aa, Unknown
  Obtained from environmental sample
  misc_feature (1)..(295): Xaa is any amino acid
ARPDALLPPGSHIWDFSIEFWLYPQGLETGEQVLFWHSSKPDGKGGYINQRIQCVVTRNRLQWTFSDIFFSPGLSASGVQERKTVSLLGPLLLNRTWSHHLIRFDADLGLLEYLVDGKLEVLEYTTSSGREGGDVYTPIIGEDCRLVLGGRFSGLMDEFRIHKNYLEKAALTRYGRNGRVETRTLDLGYADSRILKIEAFGGRTSNLSGRVRNEYAGNSSLKFSDHSEIKFFIRLSNSPYRWNEVPWVPIDPGTELQQFRGRYVQLAVDFYPGADGETSPYLSELRLIYSAAEPP

SEQ ID NO: 105480 - protein, 293 aa, Unknown
  Obtained from environmental sample
  DOMAIN (4)...(122): 1-deoxy-D-xylulose 5-phosphate reductoisomerase
  misc_feature (1)..(293): Xaa is any amino acid
EKKVAVLGATGSIGKSAMDVLRDQKDRLMPVLLTARSDAKGLMELKKEFPDVLTALSDEAAAEGAQFDFYGRDGLLSAIASAKADIAINGISGAAGLEPSAAAINAGSDVALANKETIVMAAETIFALAREKRVRVIPVDSEHSALFKLIEAHGKDNVCEIVITASGGPFREYTQEMLSGITPREALAHPTWNMGPKITVDSATLANKGLEVIEAALLFGFPPEKIKVAVHPQSVVHSMIRLKDGAVYAQMSKPDMRLPIHEALFWPETIYSPFGVLDFSSLSLTLKSRIGKI

SEQ ID NO: 105481 - protein, 270 aa, Unknown
  Obtained from environmental sample
  misc_feature (1)..(270): Xaa is any amino acid
LPPNFATNFAPFFPNNRVEYFVSYYDYYQPEAYLPSTDTYIEKDMAINDEIDKLRHSATCSLSTHKDVIIVASVSCIYGLGAPKEYYDLAISLRPGDTMPRRELVKRLTEIQYTRAGDDIERATFRAKGDTIDIIPSHTTTAVVRVMYDGDTIEKIYELDAITMTTNAALNHAAIFPASHYAVGSEKLAAAIQNIRADLDVRLAEFRAKGQQLEEHRLRQRTNYDIEMMQEMGYCNGIENYSRYFDGRRAGEPPYTLLSYFGDDFITFID

SEQ ID NO: 105482 - protein, 192 aa, Unknown
  Obtained from environmental sample
  misc_feature (1)..(192): Xaa is any amino acid
MKIQPKLDVLPEGQRLLWPHLRDMPKDFVLYGGTALALRYAHRPSVDFDFFTSKQGIDLQKTGETLPFINNFPYRVKKISDSNATFYIAVNECKDTIVELTLLNNRDIIAGSVNPPDICEDNKIKIATPIDIMACKVLALHNRSEAKDFVDVAEICKQGINLQKGFEAAYAIAKLSRLGPSQLMLDRLQADF

SEQ ID NO: 105483 - protein, 176 aa, Unknown
  Obtained from environmental sample
  misc_feature (1)..(176): Xaa is any amino acid
NKVDEIEVHRASTIIADRLCGSIANPIIRNAQEKRQLDLIKKWLEKRGYKQLPENEKRTFDNITAGTFAFHFNIQVNMDTSIGYVNIPVDIVIKPLNNNKPVLIEAKSAGDFTNVNKRRKEEAQKMSQLRNTYGNNINFILFLCGYFDTGYLGYEAAEGIDWIWEHSINDLEYFLS

SEQ ID NO: 105484 - protein, 288 aa, Unknown
  Obtained from environmental sample
  misc_feature (1)..(288): Xaa is any amino acid
ICGRLYKRYQGAGKKDKAKILDEYAPMLGHNRDYLAHLLANWGKTRYALCVGKPVKYVAKPPVQGRQKAPGSKKTGRPEKYHKAFVTALSGLWEFFDFQCGKLLAPLVKGMIDFLVQEFNMSEDIRALLLSVSPATIDRKLRKQKKAYRLKGLHTTKPGTLLKSQIPIRVCFGRGEKRPGFFETDTVSHCGANASGQFCQTLTLTDVGSGWTEERALLNSAHRWVKKRIESTRDNLPFPMLGIDSDNGGEFINHQLLDWCVQNNIKFTRGRPYRKNDNCFVSRKTALV

SEQ ID NO: 105485 - protein, 82 aa, Unknown
  Obtained from environmental sample
  misc_feature (1)..(82): Xaa is any amino acid
LSLINIKTDLNEPQFRAVTTIEGPVLIIAGAGSGKTRVITYRIAYMLERGIPQHSILALTFTNKAAKEMETRVKELTGKKLQ

SEQ ID NO: 105486 - protein, 176 aa, Unknown
  Obtained from environmental sample
  misc_feature (1)..(176): Xaa is any amino acid
MTCKRIVPTLLALLLSLYAMVGVGCGGSNDPVNPPPQPLPSGETGVTDLTISVGELSPSFSPNVQNYSTLVGYLGEASIGLRVTLKDANARLTINNAVCASGSLVNVPLVEGLNTIRVMVVSEDGRGSNTIALNVKKLPFNTRVYVLNGMGGVPVGNAKLTLTDANGKPLLENVPL

SEQ ID NO: 105487 - protein, 293 aa, Unknown
  Obtained from environmental sample
  DOMAIN (63)...(188): Phosphoglucomutase/phosphomannomutase, alpha/beta/alpha domain III
  misc_feature (1)..(293): Xaa is any amino acid
EQDVNDGNLPTVHSPNPEEPTALKMAMEKAAATNADLVLATDPDADRVALAVRNHKGELMLLNGNQTGSLLTYYLVRRWKELGKLTGKEFVVKTIVTTDLMKRIAEAYGVEIFNVYTGFKYIAEVVRDNESAKTFIGGGEESFGYTIGNFVRDKDSISACCTLAEMAAWAAAQGKTIFDVLLDMYMEFGFFKESLISITKKGQDGLAQIREMMKNFRSRPLQSIDGARVVLVHDYQTLETIDTITDLRYKINLKETSNVLQYVTNDNTIVSMRPSGTEPKIKFYFGVRAELKR

SEQ ID NO: 105488 - protein, 275 aa, Unknown
  Obtained from environmental sample
  misc_feature (1)..(275): Xaa is any amino acid
VRGADSRSLLIDPVTYSLTDLQGGDSEDGGKTNDAMRRKPGMMNERRDFRSMAVFEPYLLTGPDGTATVKFNLPDSLTTYRCTAVAAGLRNFGIKEHDLRVSAPLTAVAALPRKLRWRDTGTVSLILTNLENTSVNAHVSLEGGSNGIIEVDGENSKTVKVLPGASEEVTFRVAAVGVGEAQLTFALRSPQVNERIIRTLLVDRPSLTETVTTIGNVGSGDSFVEEGMILPSLVPAGTGNVTVSLSASRMAALKEDGALPFGLPLRRIEQRTARL

SEQ ID NO: 105489 - protein, 169 aa, Unknown
  Obtained from environmental sample
  misc_feature (1)..(169): Xaa is any amino acid
GYGGIRKKDFRLSREIEKYLSVRKGKAVCVQIREDVIEQKLEMSGWLVILGNGKLTAQKAHDIYRKKDVVEKAFMKYKNLLDLRRLRVHSDERMRNKLFVAFLALTLVSYIHKVMKEKDLYRKMTMEKMFITLSKLRKVSINGYDILRPTTKEQRDIFSAFSIPQPLVG

SEQ ID NO: 105490 - protein, 290 aa, Unknown
  Obtained from environmental sample
  misc_feature (1)..(290): Xaa is any amino acid
RQMGLSMQEKKALTREISKRYQKAQKKEKTKILDELVKTTGYNRKYILHVLANWGKTSAIRMDGKAVRLKASPNKRRKGGGRKPKYTGDFIIVLRAVWAFFWYRCGKILAPFIRENMGFLERPFRITEKDKELLLSVSPSTIDRVLRQDKKKLALKGKSGTKPGKLLKKQIPIRTYYADTDKKPGFFEIDTVHHCGTSDSGEFCLTLTATDVYSGWVELRPTLNKANKWVFQALLDIKSSLPFPLTGIDSDNGAEFINYALLKWCRDERIQFTRTRAYRKNDNCFVEQKN

SEQ ID NO: 105491 - protein, 285 aa, Unknown
  Obtained from environmental sample
  DOMAIN (1)...(147): ATP-dependent protease La (LON) domain
  misc_feature (1)..(285): Xaa is any amino acid
AANETETPAAGDLYKIGTVAKIIKKINLPDGGLNIFISTLKRFRIKKALHASNPIVAAVEYLEEEEDDTSEVKALTRALISEMKQISENNPLFSEEMRLNMINIDHPGKIADFITSILNIDRAEQQKILEILNVRKRMEQVLVFIKKEQELLRIQKKIQKEINEKIEKSQRDYFLKEELKAIKGELGMTTDAKSSDYQRFKDKIDAFKFEGEIKETVDQELEKFNLMEPNSAEFIVTRNYLDMIVSLPWNQPKSENFNMKNAQAILEADHYGLKDVKSRIVEYLA

SEQ ID NO: 105492 - protein, 239 aa, Unknown
  Obtained from environmental sample
  misc_feature (1)..(239): Xaa is any amino acid
MIGLPACSQANAAGSADTSSAGEETAIVNFVSSVAKKTAMHFNVNVGLFVPKPHTPYQWARQLDSETAAKKLDFIRSRLKPQGHKVSVCDTFVSMLEGILSRGDERAGDMAEQAFRLGTRLDPWQEFISKEAWQTALDNSPGLADEFLAAKNLAEPPPWGVINAGVSPAYLRKELEKSNRGELTPPCKEECGERCGVCNNREQGTGNREQGLKIGSQSSRESITHVTLSYQNPVPQSRI

SEQ ID NO: 105493 - protein, 251 aa, Unknown
  Obtained from environmental sample
  misc_feature (1)..(251): Xaa is any amino acid
MRNEAGGGKEMVTKNTLGAVITFAAFSVCLTLFAGCMLGDDIDTLRERAGGKNGAGKNDGGGVNTPKVTPKVTKITVTSRDNIKTVLKGETLQFGAEVEAEEGAAKTVSWSIPGDHAAGTNISPAGLLTVGSAETKTTITVRATSVATPDVYGEATVTVLAPGQAAATRVTVSSENNVSSVVKGGSLQLSATVTVVNNAAKTVTWSIAGDKAAGTTVSSAGILTIAANETQATITVRARSTVTPATFGEKV

SEQ ID NO: 105494 - protein, 214 aa, Unknown
  Obtained from environmental sample
  DOMAIN (1)...(87): Ribosomal L25p family
  misc_feature (1)..(214): Xaa is any amino acid
IVGQNRQSKGSVEARKIRRLGRIPAVLYGRTGKAISIDLDALEFANGIKNISESTIVKVEVDGKSYDAFVKDTQRNIVDGNILHVDFYEVESGIALRARVSINLKGNAIGVRDGGVLEFPLHEIEVECLPKDLPERIELDISTLGVNQSIHVRDIPLASTIRLISAPDQVVALVKYAKEQAAAAPAEGEAAAGAAATAATAAAPEAAKTHDKDK

SEQ ID NO: 105495 - protein, 78 aa, Unknown
  Obtained from environmental sample
  misc_feature (1)..(78): Xaa is any amino acid
MEALEERSTLSEISKRHELHPNMVVQWKKSLKENSFRIFEESHPEKDERDQLIESLYREIGSLTMDVNFLKKKLNSCP

SEQ ID NO: 105496 - protein, 115 aa, Unknown
  Obtained from environmental sample
  misc_feature (1)..(115): Xaa is any amino acid
MINEKQKKILSELIEQYNHLYKSEPDLKKYSEYAITYHSTAIEGSTLTENEVIELLDIGKPAKKREFLHNLMVFDHHKALLYIVETAKCKEKITEQQIQKISALVMKNTGSQFNT

SEQ ID NO: 105497 - protein, 232 aa, Unknown
  Obtained from environmental sample
  misc_feature (1)..(232): Xaa is any amino acid
MMVSSDQLSGIDAKELTRTGLMRNGQIPAWFNSRLSGMPTIDAMFGDVLYPPDMLVRVFTPAYRSFGFVMVLHVFLAGLFFFVMLRRSFGVARLAALAGAVFYMMSPQFVSHVSPGHDGKMIVIAWLPYVVWRLRSVLSLPSLRNAALMAIGVAMMILSPHVQMTYFVLMGVFLYWAADIVKAAMEKEEKKRVVGKAAYFWIAVFMGMGVSFIVFYPSYMFVREAFSVRGVD

SEQ ID NO: 105498 - protein, 203 aa, Unknown
  Obtained from environmental sample
  DOMAIN (1)...(141): Methyl-accepting chemotaxis protein (MCP) signaling domain
  misc_feature (1)..(203): Xaa is any amino acid
SRSHAAVEAARAGEAGKGFAVVAEEVRNLAMRSADAAKDTADMIEESVKNADSGVKITEEVAISLGQIVNRTGKVGDLIAEIAAASKEQAQGIEQVNTAVAQMNKVTQQNAANSEESASAAEELNNQAAELSAMVGSFKLSGSSTGNTSEAGGLTATHTPQKRHASHRVSDRQKYSPAQIKSVRAVQAKELIPLDEEELATIF

SEQ ID NO: 105499 - protein, 208 aa, Unknown
  Obtained from environmental sample
  DOMAIN (49)...(137): GTPase of unknown function
  misc_feature (1)..(208): Xaa is any amino acid
CFDKADLVEDFKIQVAEARKLARNVPVICVSSKTGFGIEELSPFLESAKTVVFLGSSGVGKSSLLNRLAGEEIMEVKSIREDDSKGRHTTTFRQLFRLESGALVIDTPGMREIGLWDSKEGISLAFAEVEELFTQCRFSDCSHQTEPGCAVLAALEDGRLSPEQWKNYKAQRRENAFVMNHSAYLKQKQEFHKSIARNNKARQKRTEI

SEQ ID NO: 105500 - protein, 265 aa, Unknown
  Obtained from environmental sample
  misc_feature (1)..(265): Xaa is any amino acid
RASSFYLQIASDHDPMSDLYDSFSNMKKKAVYRKITEIIKGTDMIFVDEIQYLEGKHKTLSLMLEITKFMEPINKPIVMTSQKIDIDKTKLVPELAERLENFEYIKIPLPDAEDRIKMLEDFLKKENLSLENPRLVVAWAKNTEKYPLKCLLNKLNRLVCEAESGVVTERTMEQIFETKDFAEKILDVISEHFKIDLKTLMNEERKFAYERSIAMYFIKNSNRGMDFYEVGKKLGRSEATARIACDGIGRILNGSKELFNKRKSA

SEQ ID NO: 105501 - protein, 209 aa, Unknown
  Obtained from environmental sample
  DOMAIN (1)...(209): Glycosyltransferase family 9 (heptosyltransferase)
  misc_feature (1)..(209): Xaa is any amino acid
SAALFPALARIPERWGYARDGRGWLLTRAVRVEPSDLVVHQVFYYLNLLEKLGIPAPYRPPRLPLEEAAQAESEIILNQAGLGNVPYLALAPGAAFGPAKRWPEAGFAQAARLILSRRPGGTVILGGPEEAPAATRLAEMLPDPTLNLAGRTTLSTAKAVLSRATLLLTNDSGLMHLGGALDVPLVAVFGPTDPTATAPLGLSRLIRSQ

SEQ ID NO: 105502 - protein, 80 aa, Unknown
  Obtained from environmental sample
  misc_feature (1)..(80): Xaa is any amino acid
TGPMHVAAAVEAGGLALFGPTRPQRTGPWGGDFEILQPARPCLGCLKKKCPRPCLAELTPEMVWIRLAARLADASRRASL

SEQ ID NO: 105503 - protein, 149 aa, Unknown
  Obtained from environmental sample
  misc_feature (1)..(149): Xaa is any amino acid
VEYAIHTTNNAAAASLTWQPQTSFGNRTPGTTYYVYARSMGNAGYYAGAPAVSAAITTLNPSGIHDVETRRAASLPNVYPNPVRDGKLIVELPDNTEKETVQIYDFSGKLMLTRVVSHPKTELDISHLPNGTYIVTIGTQSIKIVKTMK

SEQ ID NO: 105504 - protein, 154 aa, Unknown
  Obtained from environmental sample
  misc_feature (1)..(154): Xaa is any amino acid
KSRAKKISRVFGVNGVNLIIGGHPHVVQPFDKVYAPNAGDSVPVIYSLGNFFSNQRKRYTDGGIVFEVNLRKSGGAAKKGGVGKTDIVSCGYMPFWVYRYNQGDGSVFRLLPECKTYPTACEEYKMNAADKAAMELYFEDTKKLLQNLPIISPY

SEQ ID NO: 105505 - protein, 126 aa, Unknown
  Obtained from environmental sample
  misc_feature (1)..(126): Xaa is any amino acid
GDLVLLGISATSRLPEYPNVPTLVEAIPESAQYLETPFTPLSLLVKANTPKEIVDKLRDAAQKVVKDPEWLAYVKENCLEELYIKYPNEAAMKKFYADWESYVSWLIYDAGAAKFSPERYNIPRSK

SEQ ID NO: 105506 - protein, 257 aa, Unknown
  Obtained from environmental sample
  DOMAIN (7)...(90): OB-fold nucleic acid binding domain
  misc_feature (1)..(257): Xaa is any amino acid
TPQSQEVKICGWVRTRREMKNLVFVEVNDGSCLAGIQCTFDRERGAFPAETDAALAALSTGAAVAIEGRLTASPASGQAVEVAAQSLRIIGDAPAENRDAQPAYLATPAFPLQKKRHSLEFLREIAHLRPRTNTFGAVARVRNRMAFAIHQYFQQHHFQYINTPIITSGDAEGAGAMFQVTTLDWDALAKAGARQIDYAKDFFGRKTFLTVSGQLEAETCALALSRVYTFGPTFRAENSNTARHLAEFWMVEPEFAF

SEQ ID NO: 105507 - protein, 255 aa, Unknown
  Obtained from environmental sample
  DOMAIN (135)...(206): HAMP domain
  misc_feature (1)..(255): Xaa is any amino acid
IPIRSDGKVLGVMGFDLPLTNIQEISQTQKPFPDSVTAVFSNNGTVTACFDPSRIGKNMRDTEADMAGKYLNDFVNAVKAGNPFTFTNYIAPMKTDMTIFTVPITVGSTKTPLSYATAIMRNTIMAPIYEMLEITIMISAIVLLLLVLAALFLSKSISKPIVMVAENLKDIAEGEGDLTHLIVINSNDEIGDLAHYFNETLEKLRNLVKNVKKESSALSEIGNELAINMNNTATAVNQITANIQSIKGRVTNQSA

SEQ ID NO: 105508 - protein, 77 aa, Unknown
  Obtained from environmental sample
  misc_feature (1)..(77): Xaa is any amino acid
MKCGTCKAEMEESTVTYTEDVEKGVIVIRHVPACVCTECGNIWYSGTVAVQLEKMVDQFAASAGSEVSVINFAKSVA

SEQ ID NO: 105509 - protein, 260 aa, Unknown
  Obtained from environmental sample
  DOMAIN (152)...(249): PPIC-type PPIASE domain
  misc_feature (1)..(260): Xaa is any amino acid
LANIVASVGRIPTTAEINREVQNCSLETKRQILEGLINDRLALQAAERDKITITDNEVNQQITQLKAQMAQAIGRQPTDEEFATAIKNETGQDLPAFRDYIKRQGIFQKYLLSKKQNLFANIKQPTDQEVVNIYNLSKAQFVRPEMVRFSMIQVPYGADAASKNRAKELADRLIREIGSDPSKFDEAVIKGQAPNSGYQAGDGGYVPRNAEAQQAAGANFMNAAFSLRQGEVSRLIEGNGGYQIIKVTESLPQKALELDE

SEQ ID NO: 105510 - protein, 227 aa, Unknown
  Obtained from environmental sample
  DOMAIN (124)...(224): OmpA family
  misc_feature (1)..(227): Xaa is any amino acid
MAKPKCPDCPPGAPAWMSTFSDMTTLLLTFFVLLLSMANFEPVKYALTVQSLQGAFGVLQTFPTVPIHPIVNIPKKTGDEQRKKESLKDAEKIKQIVQTKNMQEAVKVEVTEKGIAIMLRDPVGFASGSADLKDQGKEILAEIGDVIKTNPDLKVRVEGHTDDVPIRSNRFNSNWELSSARSLSVVQLLSAQTGIQPQNMSAVGYGEYRPLVPNTSPDNRAQNRRIQ

SEQ ID NO: 105511 - protein, 139 aa, Unknown
  Obtained from environmental sample
  misc_feature (1)..(139): Xaa is any amino acid
MRSAEVQFEKITAKTFPKGPDSLAPGHRACQGCGEVLALRLMVKALGLDFMAVSATGCMEVCTTPFPQSAWRMPWIHVAFENAASVASGVDAGNVIRRRKGKMPDKRIPVVAFAGDGGTADIGLQALSGALERYHENFI

SEQ ID NO: 105512 - protein, 217 aa, Unknown
  Obtained from environmental sample
  DOMAIN (14)...(177): Glycosyl transferase family 2
  misc_feature (1)..(217): Xaa is any amino acid
MPILIRPADKITLLVAIPCLNEAATIVGVIEAIPKGIEGVDSIAVLVVDDGSTDNTAELAKTAGSVVIRHTNNKGVGAAFKSAVDYAVANHFSMMVNIDGDRQFNPADIPLLVRPILAHEADLATASRFIKQAMTPEMPKVKLWGNHIMAKLISFLTSSSFKDVSCGFRCYNRECLLLLNLHGLFTYTQETFLDLISKQLRIIEVPVAVRFFRAESP

SEQ ID NO: 105513 - protein, 51 aa, Unknown
  Obtained from environmental sample
  misc_feature (1)..(51): Xaa is any amino acid
MTDNLAEIKTAYHLYTDEDIAQKLIYVESTRGCPFECEFCLSAVKSDGQGS

SEQ ID NO: 105514 - protein, 227 aa, Unknown
  Obtained from environmental sample
  misc_feature (1)..(227): Xaa is any amino acid
MISNGALVIYKNKPAIVKDHADGKYTISLQNGEQVKVRDKDIELIHTGAVNNFAELENAYPSASAIREAWELLSEDTASLLLKDLAGFIYNEYTPLSAYAVYCALKDGLYFSGALDSITPRTKEEVIAEETKRAAMLHESGERMQFLDRLKACLKNPDQNKLLPEDARYLQDVEALAYGKSAKSRTMRDLTLGETPEDAHSLLLKTRLLERNDQSSPRPLRRIASSA

SEQ ID NO: 105515 - protein, 275 aa, Unknown
  Obtained from environmental sample
  misc_feature (1)..(275): Xaa is any amino acid
YIKDVADEDKTKGQFFLTGSQSLNLMQNVSESLAGRAGVIKLLGLSMREIAGSGFREPFLPDFEQREKTENAGFEYEKIAACVHKGFFPELYETPCDLRDITDFYSSYFQTYIEKDVKGILNIQNEAVFIKFVKCVASLTGEMLNLSTIAETCGKDVKTVGAWLSVLESCGLVYLLEPYYNNFNKRLIKTPKLYFLDTGLACWLLGWNTPEQLINGAMWGHIFETFVFGEILKSYYNDGIVKPPLYYYRDKDKNEIDILINSGDFLCPIEIKTTS

SEQ ID NO: 105516 - protein, 223 aa, Unknown
  Obtained from environmental sample
  misc_feature (1)..(223): Xaa is any amino acid
MPYSVPSAQELVNRNVANIEAQLHQKTPPAEKAFNTVLSTVTGMADRELYGYAADLARENLALTASEEGLERLGEEYGVYRVQPTAWEGLAVFAIPDGQTLLLGTAFIGQNGLVYKTTSSVTAPSFAPGSGVLVPIACVEGGQAGNLSVNDTLTIQTPIGAGRIATVTETVRLGTPIEDLEVFRQRILDFERSEGGGGNSSDLRSWAQAVAGVRRAYPFSGPP

SEQ ID NO: 105517 - protein, 108 aa, Unknown
  Obtained from environmental sample
  misc_feature (1)..(108): Xaa is any amino acid
MKKVVVTGMGLVSPIGKSVEEFCESLKAGKSGIGPITQFDTTDFDVKIAGEIKDFDPGLWMDKKEARKMARFTQLAVAAAAQALTDAGLMGEANAEGKRPVKSNPDRT

SEQ ID NO: 105518 - protein, 227 aa, Unknown
  Obtained from environmental sample
  misc_feature (1)..(227): Xaa is any amino acid
IDITVPPTLVSFAAGTAPARSIRSGALTGKTGNVIVLLAQAGSYPFKTANPGHTEWDIFKANMDALSSLGAISCGAASCVLSAYPVVSGGVATSLALMAFGNNAGLEIKSRALTLIDGASYQGSVLVEIDGATFRDNPRIGEILGISGCWEIAAVTIEEPVFRVTKEVDNELQAAEIPLDVLRRAYEYPLMKVYAQTSGNREQGTGNRDTSRDSFEGNKIKKRIAEW

SEQ ID NO: 105519 - protein, 230 aa, Unknown
  Obtained from environmental sample
  misc_feature (1)..(230): Xaa is any amino acid
AVQFNDQGSDAGDPLTRAESYFYKPTVEHYVRFCEEFYQSHKKRDYYIEYGKVPLTIPCDNWVDLLAPYIMDGSGNKGTPIDRYKDISVNTFDRGEFLSEYVNHIPSLPPELVMDKELKPIANAIKSGDCIAFLQHGVSGTGKTINCKLICQAIGLPIMETINCSENLDEFVLGKFIPGKGGIEFTESYVTKAIRHGGAVVFEEINFAKPQYLAFLNSLLDDNGFVRLDN

SEQ ID NO: 105520 - protein, 220 aa, Unknown
  Obtained from environmental sample
  DOMAIN (155)...(219): Anticodon binding domain
  misc_feature (1)..(220): Xaa is any amino acid
CNAFTGAPVGFAGPVGLTGLPVIIDHTVTAMNDAVTGALSKDLHYKHAAYGRDFQGWTIDGQQSVDIRTVKAGDCCSQCGGELYTKMGNELGHIFKLGYKYTRSMNVTYLDENGKTQMPTMGCYGIGVDRTLASVIEEHHDDAGIIWPASVAPYHVIIVPIKYDGKVKESADMLAQELAQKGIEVLLDDRNERPGVKFNDADLTGIPWRVVIGDKGLALP

SEQ ID NO: 105521 - protein, 63 aa, Unknown
  Obtained from environmental sample
  misc_feature (1)..(63): Xaa is any amino acid
MINQRKYITNLVLVALFASLISAGAFITVPIGPVPFVLQNFFTLLSGLVLGPFLGTSAVALFI

SEQ ID NO: 105522 - protein, 167 aa, Unknown
  Obtained from environmental sample
  DOMAIN (27)...(161): TruB family pseudouridylate synthase (N terminal domain)
  misc_feature (1)..(167): Xaa is any amino acid
MNPHPDGLLLLHKPPGLTSFDALRDIKRTLGTGKVGHTGTLDKFAEGLLLVLVGRALKLSQWFTHCDKQYEGTICFGAETETLDPEGAFLANAPIPSREDVEKAIPRFLGEIEQAPPAYSAIHIDGERASALARRGETPEMRKRPVTIFRLELLSWEPPYAKIFVHC

SEQ ID NO: 105523 - protein, 264 aa, Unknown
  Obtained from environmental sample
  DOMAIN (1)...(208): Inner membrane protein CreD
  misc_feature (1)..(264): Xaa is any amino acid
VSGQWPSPSFIGSFSPESTVDKGRFSATWNILSFNRAIQENWRDNIIVGLYSYSFGVNLIETVDGYQQNMRCAKYALMFIALTFMVFFFVEIFTKKTIQFFQYVLVGIALILFYSLLLSFSEQIGFGWAYLTASLATIFMITIYFYSLIKQLLPTVILACIMLSLYAFLYVILRTEDFALLFGSVFLFAILGVVMFVSNKIKFESTQKNTLTDSTKQEAVMAGKNVVLFGPPGAGKGTQAAKLRDLLAVPHISTGDMFRENIKN

SEQ ID NO: 105524 - protein, 63 aa, Unknown
  Obtained from environmental sample
  misc_feature (1)..(63): Xaa is any amino acid
VMKTIFVVDDSNTNLLIAKKALEGRYGLLTMPSATKMFTLLEKITPDLILLDIEMPEMDGLKR

SEQ ID NO: 105525 - protein, 194 aa, Unknown
  Obtained from environmental sample
  misc_feature (1)..(194): Xaa is any amino acid
MDGARQAWIADACPAGASPQVTRVGERFALLANAGELAIEFGVLPWERGGAVEVTKELFRHWLQARGHTKASETERSVERILGFISMHGVSHFDTWGDNERIPVRAGTKHKTDLGNCDYYFSHAGWKLACGDMEPKRVAAACMQAGLLEEGKERRYTQLTRVPGHGVGRYYLITGQAIRNHNDPEGAFEQQPVL

SEQ ID NO: 105526 - protein, 242 aa, Unknown
  Obtained from environmental sample
  misc_feature (1)..(242): Xaa is any amino acid
IAGDIAKPLGATVNMMNELGRGHLDVRLNLNRNDEIGVMAKAVDMFADDMQNVVIDTMKKISAGDLSVKIEPKDDKDEISYALKKTVESLSVVVGTMKKISVGDLSVQIVPKNDKDEISNALKRTVESLHGLIIDDGGRVFNAAANKDLSQRLTCEYQGEFARMKDNINTVMQNLNDALNQVTVTVSQVSSASNELSHSAQNFAECSSEQASSLEEVSSTLESMSSMTKQNADNSNQAMVLA

SEQ ID NO: 105527 - protein, 221 aa, Unknown
  Obtained from environmental sample
  DOMAIN (1)...(122): Beta-ketoacyl synthase, C-terminal domain
  misc_feature (1)..(221): Xaa is any amino acid
AGRHSGRGPFHDQAGNILAPQAEGQTRAMKAAWLSAGLAPAGLGLIEAHGTGTILGDRVEVETIKSLLADPDFPEAHSIAAPVLGSVKSNIGHLLSAAGAAGLAKAVLALSRRTLPPTAGFKAEAPGLDLAGPPTLRILSRPEPWPENPGGEPRLAAVNAFGFGGVNAQVIVEEFVPAAKPGPPPAVLPGLASDPEPAAGPPPLRLLSALALSAPWPDFAS

SEQ ID NO: 105528 - protein, 264 aa, Unknown
  Obtained from environmental sample
  DOMAIN (157)...(190): Tetratricopeptide repeat
  misc_feature (1)..(264): Xaa is any amino acid
ACRWPTADAYSLTTRNYTASANETTLDVGAVPNNSSYGEGKDLPFYTDNTGLRLAQVFDGLSFEGRIHETLGKSLLAHGKTIADLPAVIHHYGKLLQDREKQKIDYYLELARRDAAKSPKDKWVLFNLLQQALVARQWQTALEASEASLKLGQMVEPLVLYGAGVACQQLGRHADALKYFHLLMGHAPNHALAVLGKGESLDALGDPQGGRELIAKAIQMQPGYMPARCALADLEQRQGNFDAARRVVLNASGRSPKRAVALRP

SEQ ID NO: 105529 - protein, 255 aa, Unknown
  Obtained from environmental sample
  misc_feature (1)..(255): Xaa is any amino acid
YNDWKSKNLSLIGPNKLVNQDTDIKIIEQRVSWLNEYKNFIDQQHYAEKFDSRSNLHSSVLEEFMYYLFKDMISEYSDNALIGKAHVFKDIFFRADNYELMICKPNAKIEVKDHDFTIGARINATMNTLGSDDIEKYTWDIPAIAIECKTYLDKTMLQDASTAAEELKHRNPNAIYIVVAEWLKLTDAVNLKKFKIDQIYVIRKQKNTDREFRYEKDYIKNPIYLDVIFHLSNFVRDFLTKDWESGIDFGLSKDI

SEQ ID NO: 105530 - protein, 228 aa, Unknown
  Obtained from environmental sample
  misc_feature (1)..(228): Xaa is any amino acid
TGLHGFALSLLVDERYYSALSNHINSTHLGQRLVYYRAGRAETWQEKPVSPDSMIFKLNIKEGNYAEWLKAELRQRFNYSCVESVQTFRAAERALTREGQVKHSKTRHEKDDRSAVGDRRNWILGFDNREKLALFQQQAQELAAAISDLDKKINALSEQDDLNRKRALQCQTLVNMQWQEIDALPIIERISAIEKQIREMRDGNKVLREISERINMQKPIVKRAEEDL

SEQ ID NO: 105531 - protein, 168 aa, Unknown
  Obtained from environmental sample
  misc_feature (1)..(168): Xaa is any amino acid
NPVAYFGKYNIQPAQVLKDAIAIAASNTPHDFDKDGPHIVTGPIAVEGAAPGDVLKVEVIALEPRVPYGVISNRHYLGALPGEFPEGPKSEKDASPAAPEKYHNVSIFTPVERRGDRWYGILESGGKRIAFPLSPFLGLMGTTPNTGESWNSIPPTRIGGNIDINELG

SEQ ID NO: 105532 - protein, 159 aa, Unknown
  Obtained from environmental sample
  misc_feature (1)..(159): Xaa is any amino acid
VLPTLKLPEEEGRELLAKANTFSLAHIHAAWQMTLDAQRRVIHSLEPASALELLLLNIALLPRLVPLDQAPLPQGPGLAAPALPAPDGASQPPRQSGGFQAKTQTAPAAIPTPEHETKAPSAAPVSGKASELPEPREQLKACETPKAPEMPYDDTPPPA

SEQ ID NO: 105533 - protein, 241 aa, Unknown
  Obtained from environmental sample
  DOMAIN (112)...(237): RNA polymerase Rpb1, domain 5
  misc_feature (1)..(241): Xaa is any amino acid
IVVPKEKAEMIEKANKEVEAIQKKFNSGHLSPEERKNRVIEVWQKTNEDLANILMKTLEADRNGFNSIYMMANSGARGSRNQIRQLAGMRGLMAKPSGDIIELPIRSNFKEGLSVIEFFISTNGARKGLADTALKTAEAGYLTRRLVDIAQDVVVNEDDCGTINGIDQAAIKTGEDIQEPLRDRIVGRYTLERVKHPITGDVIINVNQEITKEIAAQIEEAGIESVYIRAVLTCEAEHGVC

SEQ ID NO: 105534 - protein, 243 aa, Unknown
  Obtained from environmental sample
  DOMAIN (1)...(190): Aconitase family (aconitate hydratase)
  misc_feature (1)..(243): Xaa is any amino acid
GVITSVCPSDDKTRLFLKAQGREKDFAEVFADADATYDRVIQIDLSTLEARAACPHSPGNVKKLSELSGTKVDQVLVGSCTNASYRDVMLTAAMLKGRKVSPAVSLGVAVGSRQVLEMVSRNGALADIVSSGARILESACGFCIGNSAAPRTDAVSVRTSNRNFFGRSGTPSAQVYLTSPEAAVAAALSGEMRDPAEFFADRKYPKIAVPGKFIIDDSMILKPAADPSKVVISRGPNIGAPPS

SEQ ID NO: 105535 - protein, 229 aa, Unknown
  Obtained from environmental sample
  DOMAIN (86)...(136): Regulator of chromosome condensation (RCC1)
  misc_feature (1)..(229): Xaa is any amino acid
GTATVTVTGGGPGPSSDWKAVAAGTSHTLAIKTDGSLWAWGYNQFGQLGIGTSDLNEHPTPTRVGTDANWVAVSTNFDHTLAIKTDGSLWAWGRNGNGQLGLGDSGSSTNRNVPTRVGADSNWAAVSTGGDHSLAIKTDGSLWAWGYNFRGQLGLGDSGNGTERKVPTRVGTDANWAAVSAGGIHTLALRTDGSLWAWGYNYNGQLGLGDDNDRSTPTRVGADANWAAV

SEQ ID NO: 105536 - protein, 247 aa, Unknown
  Obtained from environmental sample
  DOMAIN (2)...(239): M42 glutamyl aminopeptidase
  misc_feature (1)..(247): Xaa is any amino acid
VRNSRGEWVPGIIASKPPHYLSEAEKKQAPEISDMAIDVGASSDREIREDYHISIGAPAVPAVSFEYREEHDIMIGKAFDDRLGCAAVVSILGELVGEELAVNVTGAFAVQEETGMRGAEVTGQTVEPDIAIVFEGSPADDTVVEPYAVQTALKRGPMLRYFDARMITNPRFQRFALDTAVEKCIPVQEAVRTGGATNGGVIHLSGKAVPVIVISVPARYIHTHYSISSYSDFEHSVRLACEVIRGL

SEQ ID NO: 105537 - protein, 254 aa, Unknown
  Obtained from environmental sample
  DOMAIN (57)...(235): Integrase core domain
  misc_feature (1)..(254): Xaa is any amino acid
FGITDEIAEKLTKISPASIDRYLKKDKQALRLKGKSLTKPLDSLKSRIPIRTFYTSEERKKPGFWQIDTVHHCGQATTGQYLHTLTATDIASGWIELCSLLNNAQKWTFEALARIKTAALIPILEFHSDNGSEFINNATETWCKANAIPFTRSRDHKKNDNCFVEQKNGAVVREYVGYDRLEGIHEQALLAAVYQPLIPLLNFFMPTQKLKSKTRVGSKEIKVYDEPISPFQRLIESAEVSQQTKDSLEAQIAL

SEQ ID NO: 105538 - protein, 164 aa, Unknown
  Obtained from environmental sample
  misc_feature (1)..(164): Xaa is any amino acid
MNQNFTEIVFILDRSGSMGGLENDTIGGFNGFVKKQAETGQTSLTTVLFDDKYEILHNGVDAGKAVLTSDEYFTRGSTALLDAVGKTINDVGKRLGETPEALRPGKVIFVITTDGLENASREFTYDEVQKMITHQSEKYNWEFVFMGANIDVAKEGSKLVSCHY

SEQ ID NO: 105539 - protein, 184 aa, Unknown
  Obtained from environmental sample
  DOMAIN (1)...(133): GGDEF domain
  misc_feature (1)..(184): Xaa is any amino acid
LLDIRLAPLRRIAREHGQTFAESVLRELAEALTRALPEGSPAARVGDAVLAAFVPGARSACEQAAAAALSALDGVRLKAPVSRREVGVMAHAGFALYPQDMDGAGVGHEPYEQAHRLMQRAALAAASAARSDASWPVRCLGYGRILLEGGTILRPLPLARLAVSIGRSVGAREGQRFAVWERAL

SEQ ID NO: 105540 - protein, 158 aa, Unknown
  Obtained from environmental sample
  misc_feature (1)..(158): Xaa is any amino acid
VKTTPKTSVDNRNSLNFERPRLNQLFAEAVKYPVVVVCAGAGYGKTCAVHDFAQEYHATTFWLQLSERDNTGARFWESYIHTLTKINAPLTKALTKLGFPDTKDKLNHYLTLLSDLVEKKRRIIVMDDFHCIEEPSVIKFIEECILFKMPPGTSVFII

SEQ ID NO: 105541 - protein, 184 aa, Unknown
  Obtained from environmental sample
  DOMAIN (7)...(184): Pyridoxal-phosphate dependent enzyme
  misc_feature (1)..(184): Xaa is any amino acid
MKIANNITELIGNTPLVRICKINPYEAEIVAKLEMFNPLSSVKDRIGLAMIEDAEKRGVLKAGDVLIEPTSGNTGIGLAYVCAVKGYRLILTMPETMSIERRKILSALGAEIVLTKAYDGMEGAVNKAKELAASMPNAFIPQQFDNPANPEIHRRTTAQDILRDTDGKVDIFVAGVGTGGTLTG

SEQ ID NO: 105542 - protein, 246 aa, Unknown
  Obtained from environmental sample
  DOMAIN (7)...(244): Amidohydrolase family
  misc_feature (1)..(246): Xaa is any amino acid
IDVNEAIIAPGLIDTHIHGFGGRGTEDSSAESIIEMSRLLAQYGVTAFNPTLYPMEKELMLEAVKAAVSAIGREDGAQVMGLHLEGPFISPERLGVMKAGTVQNVDLAFMQELWKAAEGRIVNMTVAPELKGMRELALFCLKKGIVLQAGHTEAEYENMVEGMQAGILHSTHLFNAMSSMKHRNPNAVGAILIHPEMSCEIIADGFHIHPDLYKLLLRDKPIDRIVLVTDALKPTEQTTGPLLANG

SEQ ID NO: 105543 - protein, 76 aa, Unknown
  Obtained from environmental sample
  DOMAIN (5)...(61): Peptidase family M23
  misc_feature (1)..(76): Xaa is any amino acid
MCLLSTNTRYYTRYAHLLSARVRLGQRVQQGEVIGYIGNTGLSTGPHLHYEIRIGSDVVDPYRYINIRSSIAKQGR

SEQ ID NO: 105544 - protein, 246 aa, Unknown
  Obtained from environmental sample
  DOMAIN (1)...(86): Response regulator receiver domain
  misc_feature (1)..(246): Xaa is any amino acid
MNGRFALDKIPRVNPDIIILDLEMPEMNGIEFLKERKKRGITIPVVILSSIARRGAEITMEALSLGASDFIQKPSGAVSEDIHLVRDTLVGMLLGYGGSYRKTQGKKVLAPSEYKEKPVKPPSSPDLQVHFNLSPVVTAPAKSPTQVRKPANTEIIAIGISTGGPDALRVVFAQLDADLKVPIVVVQHMPPGFTNEFARSLDRICPLDVKEAEDGDDILAGRILIAQGNKHLEVEKKGVHPPVVRL

SEQ ID NO: 105545 - protein, 253 aa, Unknown
  Obtained from environmental sample
  DOMAIN (1)...(252): tRNA synthetases class I (I, L, M and V)
  misc_feature (1)..(253): Xaa is any amino acid
KRDFIRLGGLADWDNPYRTMNFDMEANELRALSKIFQKGFLVRGQKPVNWCIDCCSALAEAEVEYEDKTSTAVDAGFEIVDKAALTTAFGVEGGIEGQVFAVIWTTTPWTLPANQAVCVSPDIDYDLVQTDRGCLILASLLKEAACRRCNLEPIRTIATVKGAALSALALKHPLFDRTVPVVLGDHVTLDAGTGLVHTAPAHGLDDFRMGLTYHLPLDNPVDDAGRFVASVPLFAGLSVWDFNAPIVETLRSG

SEQ ID NO: 105546 - protein, 87 aa, Unknown
  Obtained from environmental sample
  DOMAIN (3)...(82): FKBP-type peptidyl-prolyl cis-trans isomerase
  misc_feature (1)..(87): Xaa is any amino acid
MTETDDETICPTSQVTLHYRLTLEDGEAVAGTVGMGPALIQMGSGQLSANLEKCLIGLKPGDGGRWRLDPESAFGMPMPPLVQKIDR

SEQ ID NO: 105547 - protein, 102 aa, Unknown
  Obtained from environmental sample
  misc_feature (1)..(102): Xaa is any amino acid
GDASISDSVIGVRSVVGDKTKLSRVILMGADYYSNEEGGGALGIGKNCKIRNAIIDKDVCIGKDVRLENLNNIQDGERDGIIIKDGIIVVPKKTVVPDGFVL

SEQ ID NO: 105548 - protein, 141 aa, Unknown
  Obtained from environmental sample
  misc_feature (1)..(141): Xaa is any amino acid
VEIKGVYHLCETGVDDDAAILFRYENPDVLALLRCGLRSTGFDTRIIGSKGTLIIEQHDRPHRLIVKHHEYNVTYHRQDEIIEIPYRFYGLQYEIQAAIDCFRQGKKECETTPWQETLDMARISEDLRHEAGVWYPFEERE

SEQ ID NO: 105549 - protein, 218 aa, Unknown
  Obtained from environmental sample
  DOMAIN (1)...(218): Enolase, C-terminal TIM barrel domain
  misc_feature (1)..(218): Xaa is any amino acid
VANIINGGAHSDAPIDIQEYMVMPIGAKTFKEGLRMVAETFHALKKVLKDRGLATAVGDEGGFAPMLANNEEPLSVIMEAIRAAGYEPGLDKDIAIAMDPASSEFWSEEKKKYVFKKSDNRELSAEEMVNFWEDLANRYPIISIEDGMAENDWEGWKLLTDRIGNRVQLVGDDLFVTNTKFLRKGIESGTANAILIKVNQIGTLTETMDAIEMAKKAG

SEQ ID NO: 105550 - protein, 113 aa, Unknown
  Obtained from environmental sample
  misc_feature (1)..(113): Xaa is any amino acid
MEYVRNRRLFYAASELAKGKKIVDVAFDYGFETHSGFTKAFSRYFGCSPEKYCEHSSFDVPKLPILIKTKQYVNGGIVMEPKMVKKPAIKIAGFSIKTKIKEGENSKAIPKFW

SEQ ID NO: 105551 - protein, 237 aa, Unknown
  Obtained from environmental sample
  misc_feature (1)..(237): Xaa is any amino acid
DSTANKPTTRTLEWTVNNTETWVEAINGIKTGGNWKTHIIIVSGDISIPINGGNTFGSVKKITVNLEGSGTLSLSGDGNLLSVGAGQMVSVIGTLNLSGRNNNTGSVVVIDSGGTFRMAGNAAITSNIVNGDGGGVLVRSGEFIMDESSSMSGNSAKGSGGGVFVYNGEFAMHGSAKVSGNTANNGGGGVYVESGKFVMTDSAMVSNNTVWLGGGVYVGSTGTFVMQGNAKVSGNTA

SEQ ID NO: 105552 - protein, 204 aa, Unknown
  Obtained from environmental sample
  DOMAIN (1)...(164): Sigma-54 interaction domain
  misc_feature (1)..(204): Xaa is any amino acid
VDVNCAAIPETLIESELFGHEKGAFTDAVSARKGRFEMAHGGTLFLDEIGDMSLSAQAKVLRVIQEQKIERLGGEKTIETDVRIIAATNQDLEKACETGRFRQDLFFRLNVIPIHVPPLRERPEDISMLLCHFLNLLNVEITLEADAMELLTSHDWPGNVRELKNLAERIAVMHRGPGITGDDLSKLLNKKSKKPQNTGNQLPE

SEQ ID NO: 105553 - protein, 227 aa, Unknown
  Obtained from environmental sample
  misc_feature (1)..(227): Xaa is any amino acid
ACAALGATLTACPSRLGWGILLWSIDEPPIPSGTVLPVYIKSNINKVWVVGLPEGWHGGKNQMDKIEIPFSRFELVGSKRKAKMRAEAFSKYALSYAENLQDGLPIRDAPDNNGRRIYRLKMGEIIKILSVTEGSPAIGSTGEPLPGEWYKVLTEDGSTGYCFSYRLRVFEYGGGEFAASVAVVNEQTEDPELDTLLSKTWSPESYLTMINSKRIDLEDMSRHWRFD

SEQ ID NO: 105554 - protein, 168 aa, Unknown
  Obtained from environmental sample
  DOMAIN (2)...(159): Hydantoinase/oxoprolinase N-terminal region
  misc_feature (1)..(168): Xaa is any amino acid
MYLGIDAGGTHTDAVIIRSGAVVARAKLPTRHEDLAATLREALAALPAALRKDITRVTLSTTLAINALLQDKADAVGLALCGGPGLDPVRFALGDHTHVVPGGLDHRGVEVTPQRLDSLNAAAQGWQAKGVRAFAAVGKFSPRNPAFERAMADVLAPFGDVVCQGHAL

SEQ ID NO: 105555 - protein, 238 aa, Unknown
  Obtained from environmental sample
  DOMAIN (49)...(173): Region found in RelA / SpoT proteins
  misc_feature (1)..(238): Xaa is any amino acid
MSTSQYPDRKKLRDEYTSLLPLYIAALEVCQARLREALARSDVHFTMKYRVKTFDSYYGKLLRRKTIEKRTGEAIPIHDIIGTRVVCPFLADVEVVENCLRSAFAVHEIEHKGAERAFSEFGYSSTHLLLGIPADISEKFPGLNLKIAEVQVRTFLQDAWAEVEHELIYKNSNNITPMDEPLRRKLAALNANLSLSDDIFQEIRDYQRRLHSELNKRRYSFTAQLDEIKPGLTAAAPQ

SEQ ID NO: 105556 - protein, 114 aa, Unknown
  Obtained from environmental sample
  misc_feature (1)..(114): Xaa is any amino acid
MGKIKRTDLVGGHMQEFLMLVPFFIGFVTFTVYPIFWALRWVLYDYSGLGKPFFVGLDNFARAFFRDKEFWRSVSNTFYLAFMKLIIELPLALLIAFFVNNKVKGSSVLRVIYF

SEQ ID NO: 105557 - protein, 154 aa, Unknown
  Obtained from environmental sample
  DOMAIN (6)...(149): short chain dehydrogenase
  misc_feature (1)..(154): Xaa is any amino acid
MSIKGKVAVVTGSATGIGQGVALALAQAGAKVAVTFNWNPADQTMRLIKEAGGEAILVKTDVRSRESIRNLMKETHSAFGRLDILVNNAAVQPNKLLFDYTEDEYEQVMEVNLKGYWRCIQEALPYLKQAEHGRIINMASIHAKRPTGLTRSTQ

SEQ ID NO: 105558 - protein, 110 aa, Unknown
  Obtained from environmental sample
  misc_feature (1)..(110): Xaa is any amino acid
MQKREPIFNALAKRLESIDGIATFDRKLKTWEDVHASQQPALFMAAAGQVVERQGRGLSALTIRVQLYLYNRTNDGPSQNDLLDAIDDALAPIESEPDYGVECTLGGLVS

SEQ ID NO: 105559 - protein, 286 aa, Unknown
  Obtained from environmental sample
  DOMAIN (136)...(248): PAS fold
  misc_feature (1)..(286): Xaa is any amino acid
TMPDNLYVSQIYRWDRKSGGTTIPTKGLVNVTYEQCAPRWKTLLMSGETINSPVSLLPEADMLHSFGSISVFVTPLFINNAFWGFGLLEDRHSERFFEEDSVDMMRSAAFLCANTVIRSEMERTIVDVNEFNRAVLDASPLAFTVFDENARVIDCNDITLRALGTTKEYYINHFLEFSPEYQDDGIRSEDKVADVVKRALSGEKLILEWLNITTDKKPIPYEITLTRTKYNGKYVVMGYQYDLRNFKNLEKNIQVQSELLKIRLEQQELISEISRGFISSGDSENY

SEQ ID NO: 105560 - protein, 220 aa, Unknown
  Obtained from environmental sample
  DOMAIN (5)...(146): Thiamine pyrophosphate enzyme, C-terminal TPP binding domain
  misc_feature (1)..(220): Xaa is any amino acid
CTGRVAGYLNLDSFHTTHGRAIPFATVLKLSNPELNVVVYSGDGDLFAIGGNHFFHAARRNMDLLVVCVNNYTYGMTGGQVAPTTPLGPTQTTMPFGNFEPSFNLPFVADACGATYVARWTVFHVRQLAKAMEEALLKKGLRFIEVLCPCPTLYSRRNKLGDGVDQVKYYKEKSTIKQGTDTKEAVLTFQGEIVVGKFVDRERPTWLDAMNKHLSAVLGN

SEQ ID NO: 105561 - protein, 89 aa, Unknown
  Obtained from environmental sample
  DOMAIN (14)...(37): 4Fe-4S binding domain
  misc_feature (1)..(89): Xaa is any amino acid
MANESTEQKGKGTVFVKGELCKGCSYCIDFCPTGALGFSKEFNHKGYHYPILVQPEKCTGCDLCGLYCPDFAIFGERFKDLEEKRKKTG

SEQ ID NO: 105562 - protein, 160 aa, Unknown
  Obtained from environmental sample
  misc_feature (1)..(160): Xaa is any amino acid
MKMQETEERTQIMLDAAPFSVIFWDKDLKLIDCNQEAVKMFEMIDKADFIEHFYYLSPEYQPDGILSKDKGIDLVGKALREGYSRFEWTHQKMDGEMLPVEAICIRVKHRNEFTVTEYIRDLREQKKMIAEMRKAEAAEESSKAKSEFLAKMSHEIRTPM

SEQ ID NO: 105563 - protein, 210 aa, Unknown
  Obtained from environmental sample
  misc_feature (1)..(210): Xaa is any amino acid
MTLAHELGHAAHGMLAGRAQGALMHSAPTAYAETASIFGEMLTFEKLLAGARSSKERLALLMGKCNDWINSVGRQICFSEFEQELHLHRRAGKLSEADLNEIWVRKSKEFYGDIFDYRDMESLWSYVGHFMRPFYVYSYAFGELFTQSLYAKRNMPEFEKLYIDMLASGGTRDAAALMAPFGLNPKDADFWKKGIEGSIARWLDEIEELA

SEQ ID NO: 105564 - protein, 174 aa, Unknown
  Obtained from environmental sample
  misc_feature (1)..(174): Xaa is any amino acid
MLLAGGGSRNGGEDKSCGAEGMQNLKNLTLPQLEDFVLSLPEQRFRAKQIFKWMYQKRLPDFSEMTNMPKTLRSALSERAAIGKLKPLRVLESSVGDAVKFAFALEDSGYAVESVLLIDGDRRTACLSSQLGCGLGCAFCETAKLGFIRNLAPSEILGQLIGMNDYQTARGDRI

SEQ ID NO: 105565 - protein, 98 aa, Unknown
  Obtained from environmental sample
  DOMAIN (1)...(80): Formyl transferase
  misc_feature (1)..(98): Xaa is any amino acid
IHPGVLPAFGGQGMYGSNVHKAVIEYGAKISGVTVHFVDDEYDHGPVILQKAVPVLDDDNYQTLAARVLEAEHECYWQAVEAVTAGRIKVVGRRVCKT

SEQ ID NO: 105566 - protein, 251 aa, Unknown
  Obtained from environmental sample
  misc_feature (1)..(251): Xaa is any amino acid
MIGLSLAVVAVLVALFIFVSRMFNNVIDRKITDNREKWFKGIRFRNIEILTSEKLTSAALFVSKAMRYAIYAVLLYAALPMIFAIFPATRHIAKLLFSWIADPVFSMGESLIAYLPNLLRIAVIIIVMRYILKFMRYVAAEIETGRLAIPGFYPDWARATFNILRIFIYAFTVVLIFPLLPNSDSSIFKGVSVFIGVLFSIGSSSVISNMMAGIVITYMRSFKIGDRIKVGDVYGDVVEKTLFVVRIQTIK

SEQ ID NO: 105567 - protein, 171 aa, Unknown
  Obtained from environmental sample
  misc_feature (1)..(171): Xaa is any amino acid
MVISGIPEKKIFSVLVLCILILISCDIKYYNDYDSRFAWHDDVRFPALTAPLGESYSFIVISDTQIKNKKYADRFAVIKSILTADDRFIVIAGDITDDGTEEQLQCFLDTCAFIGIPCYPVIGNHDIRTERGKHWKELIGSTVYRIDSSDTSLFFLDNAHGAFGYEQLEWF

SEQ ID NO: 105568 - protein, 274 aa, Unknown
  Obtained from environmental sample
  misc_feature (1)..(274): Xaa is any amino acid
SPALFEQTNIITELLPEEVGGFTEIFKNRVVIPHNGSLSDLRHVLHHEFVHAFIFGMIYGGNILRATGAHVPLWFNEGLAELLSSGWERQADMFMLDRSLNSTVPPPSSALDGYLAYKGGQSFLYYLHSTGGDSLFNRMLLEFRLTRSAETAIERIYAKNMEDLGKDWQSELRRIYWPEVGRRANPEAQASLISAKERSRANVHPRLSPDGGRVAFFSDKYDYTRIIVADTAGKELRRIGGEHSLGSSFESFRHFNGAIAWSPDGKRLAFIAKK

SEQ ID NO: 105569 - protein, 208 aa, Unknown
  Obtained from environmental sample
  misc_feature (1)..(208): Xaa is any amino acid
VTGPLNGIRASASAQLAPPLPFTNEAYLSGDIDIRHYTHIFRRYVWANRLVLGASVGLGGNDHAARRYFLGGNENWFNYDVNVDNYNKNLGYSYYSTIVSPLRGWNYFDLTGDKAALLNSEFRFPFIREISTVWPIPMQIRYINGALFLDAGYAWTGNAIPHEIAAGYGFGMRANLGIFVLRYDMGWPTDFKGLARKPINYFSLGAEF

SEQ ID NO: 105570 - protein, 173 aa, Unknown
  Obtained from environmental sample
  misc_feature (1)..(173): Xaa is any amino acid
DKHGKFLSSLGVSDDDGIKIEDRYLLEREEMQKQWLSLQLKEDEYAQNMETLKSNDQRLQDKEDQLIAFEKQLNEREKKTGEDKAAEVRRSERIAQVANQLMNMPPQQAVERLEQQTDDLLVIDILNAINTLSEAQGRRTVVPYYISLMSKERAAIVQAKMANIARLTNENDF

SEQ ID NO: 105571 - protein, 282 aa, Unknown
  Obtained from environmental sample
  DOMAIN (25)...(271): 7TM-HD extracellular
  misc_feature (1)..(282): Xaa is any amino acid
ALCVIAVIVIITSGNNESAKDIGDYEAGKVASNDVIASTSISYLDEEATKLRQETAIRQVPAVFSFSEETNINILYSWNQFCDYTDKLDTKNIYAAIRLINNEYPGDFSDETLETYLSSDERLNFRNYGAFVLNAVLDKGIFSYRHEEIISYNNNVLELVRVHENETQREINSYNEITTIANVRDALEDIVKTTEASSAFKEIAVNLLRPFLAPNVFFSYPESQRRVEETRGMVAPVIRTIEKGHKIIRKGFIITEAEMEIIKIYLSSFPKRIPAIFLGFIF

SEQ ID NO: 105572 - protein, 238 aa, Unknown
  Obtained from environmental sample
  DOMAIN (168)...(238): Transporter associated domain
  misc_feature (1)..(238): Xaa is any amino acid
VKTPFQLNTRAIKELEEEQQQMIRGIVELSGTTVKEVMVPRTDTVFLSASASREELLACICESPHSRFPVYQDTIDNVTGILHVKDVLKALVNNKPININELARKPIFVPVTKHIDALLRELRRKKVHIAVVVDEYGGVSGIVSMEDIIEEIIGDIQDEFDHETEDVVALGEDVWLCDARVNLKFLAEETNLALPVDDFDTLGGFVFDLFGKIPVKNEKIEYKNYSFIIQEMDGHKIN

SEQ ID NO: 105573 - protein, 271 aa, Unknown
  Obtained from environmental sample
  misc_feature (1)..(271): Xaa is any amino acid
VRINDPLVNLSKGFNHFRPSLRWEEDGRLLCLPEYGPAGNADKALLDRAVHIGGDMLNFLLLLFSMAVRPCRLKIMGESALKLADLSPLRHFLPAVGARFTSIIPGQDGLPARLEASGILPEHVAVPAGIEADAALALCLGLACAPRSRPVEVHLAAHPAAASVLEEALDILELAGAAPRRDGASLHFEAVDKPLLHMPDSGKLFMDLTMAVTFLMFPALIGGTARIFGVWPAGKAADAAWKLLEAAGLNPRREEGHIAATRPEGSAACDI

SEQ ID NO: 105574 - protein, 276 aa, Unknown
  Obtained from environmental sample
  DOMAIN (71)...(252): Phage integrase family
  misc_feature (1)..(276): Xaa is any amino acid
SQVTPRILDKWKLAVAQSEASRKGINHALNGIRVALRWAFTRGYISSDPTFSFKYISYKPQEKGALSSLEMSQIESLEWPDIRQKAAIVLGFSCGLRRGEIRALRWRHVDLEANIIRVCENYTDDDGLKEPKAGSFRLIPIFGTVLDILAELKRTNPYGGEPEDFVLPNVERGKPLAAITIKRGFTRIMDAIGIGKDAREKRNLSFHSMRHSFVTRAREAGLPDFVVSALSGHRTTQMVEHYSHQTMTAVESARGSLEAAFTQANQAKDSVQYAKQ

SEQ ID NO: 105575 - protein, 212 aa, Unknown
  Obtained from environmental sample
  misc_feature (1)..(212): Xaa is any amino acid
MRKLLFTAFTTIAILGCSNNDMEELPCISCVAGGCPNATTGNNTLSCGGQTYKTVVIGNQTWMAENLNYNATGSKCYENDESNCQRYGRLYDWFIAKKSCPSGWHLPSDADWDKLVNYVESSNGCSSCAARYLKTSDWGGEDKYGFSALPGGDGHSDGDFSSVGSFGNWWSATEGSAYDAYGRYMSYDYEDVYRGYYNKDLYLFSIRVSRTK

SEQ ID NO: 105576 - protein, 59 aa, Unknown
  Obtained from environmental sample
  misc_feature (1)..(59): Xaa is any amino acid
MKEAQMIGIIGAMEDEVSLLLGAMGTPQKTKIGEFEFHEGKLEGKDIVLLRCGIGKVSA

SEQ ID NO: 105577 - protein, 263 aa, Unknown
  Obtained from environmental sample
  misc_feature (1)..(263): Xaa is any amino acid
MPCDILPDAKSIVSFFIPFHKDVVESNIDGVMASREWAIAYVKTNDIIAAISDKIETLMAERGYKTGKIPATHNFDEKKLISNWSHRHIAYIAGIGTFGINNMLITKKGCCGRFGSIVTNYEFNEYPQKKESKEKCLNKLHGGCGICRKRCVANAYPNESFDRYLCYKQCLENGKHHREIGHTDVCGKCLVGLPCSLKEPSQKAATPKENYCLMVETAKAFIEDESDLVALLANLSALIKVYVEDLSWAGFYLLKGKELVLGP

SEQ ID NO: 105578 - protein, 211 aa, Unknown
  Obtained from environmental sample
  DOMAIN (140)...(211): Sigma-54 interaction domain
  misc_feature (1)..(211): Xaa is any amino acid
MAKILVVDDEEIMRDMVADSLELNGHRCTVAANPQIALEQISVVNPDLIISDYKMPGMTGLDLLKAVKKDRPSQPFLMMTAFGSIEMAVEALQNGADHFIEKKDFEHAEIIEHAVAMVLEKYKYRMENTVLKKRLCEKNFIGHSEKFVALNKFVETVAPTNASVLITGESGVGKEVLARALHYQSLRAGGPFVKINCAALPESLIESELFG

SEQ ID NO: 105579 - protein, 164 aa, Unknown
  Obtained from environmental sample
  DOMAIN (10)...(162): Elongation factor Tu GTP binding domain
  misc_feature (1)..(164): Xaa is any amino acid
MAKEKFERTKPHCNIGTIGHVDHGKTTLTAAICTTLAAKGLASAKKFDEIDNAPEEKARGITINTSHVEYQSEARHYAHVDCPGHADYVKNMVTGAAQMDGAILVVAATDGPMPQTREHILLARQVGVPAIVVFMNKVDMVDDPEILDLVEMEIRDLLKQYEFP

SEQ ID NO: 105580 - protein, 265 aa, Unknown
  Obtained from environmental sample
  DOMAIN (1)...(94): Bacterial flagellin N-terminus
  misc_feature (1)..(265): Xaa is any amino acid
VIQTAEGALAETQSILQRIRELAVQSANDTNTDSDRSELQAEVKQLLTEINRIGNTTEFNTKKLLEGSAKGVSDEIKGTSRVNNNSSLVLDNSKIAKMGEAVAGDKSWEFDGAYSLVRTGKKKEGEFNAEDFMLVGPNGAQYKFATLAEGGVDVGVSVPGAIIFAEKNIGAGDTYIQFSSNTGVALAADYKSMAVGDSVTFIFSRYQAPSSNLADSFMVQIGANSGQTAFISIGDMRAQAIGVANIDISTKWGAATAIETGTTPY

SEQ ID NO: 105581 - protein, 267 aa, Unknown
  Obtained from environmental sample
  misc_feature (1)..(267): Xaa is any amino acid
AFGYGLLAILRPIIGKGAEGSLAANLAFEHWDVDRKLKEQYRMYGASDDEVWRLAETSHAVLRRTTLQRIADYTISAYTEKGKFDADRFAGTIIEKSYLHDDFRRLIGINHFNNITWFNKEAFESALFYGKLFYVLEGDSAFTTSKPLPWLERAAYIAEIIEALQKAQTASGYQLDKLINLLAGEEFTDEKVTDKKPALKKPADKKATAKKPVVKKVAVEKATEEKSAVKKPADKKATSEKPATKKTTGEKSAAKKPSDKEATDKKP

SEQ ID NO: 105582 - protein, 235 aa, Unknown
  Obtained from environmental sample
  misc_feature (1)..(235): Xaa is any amino acid
LTAINRWNWFTSEQLALKSGFDYRFIWLDSTDIGNRDRHDGGIYLTAEYKPVQQLMIIPSVKAVFANKGDTLFTAVPKLGLLWNVTDSLALKNNYFRSFKFPDFEELYWNDGGFATVGNPDLKPEDGWGGDIGLSWCYKDLFIFESTFFTHWLKDSIHWYQGTGGIWRPENVGEAIFLGLDNKLRFEIPVKLGAIKKIIPSVSYQYLLSYLLSFGYDFSDNKRIPYSPAHTIGGS

SEQ ID NO: 105583 - protein, 284 aa, Unknown
  Obtained from environmental sample
  misc_feature (1)..(284): Xaa is any amino acid
TGIETAFLMGRLKGRLSGERRPQFILTSATLGDGSSESNAIVVGFARNLTGCDFLQDDIITAKYRNTTDKYSSTDIHPAKLYSDLANDEMVVRDTLKTYNINFSMDAKDADIIYDIIIKTKLYVAMRELGRLIRLDDFARRLDISRDDAVAFISLCAKARKDGMPLVDIRYHYFLRTLDGAYLALDFPQSFSLIRHDSYENKAKMFEIGVCDNCGEIAIIGKQEGEKLVRIGIGDEVECYQIDNEKDMDDFENDEGDVTDGGCRQKKPRKKVSVDFVLCKSCGA

SEQ ID NO: 105584 - protein, 138 aa, Unknown
  Obtained from environmental sample
  DOMAIN (1)...(127): Phosphomethylpyrimidine kinase
  misc_feature (1)..(138): Xaa is any amino acid
NVVTPNLFEAGQLSGIKEISSVEQMKKAAKIIAEKGAANVFIKGGSKLLDAAEAVDLLYDGKNFELIKDRLIKTNWVHGAGCTVSAAIAAGLARGLSVYDAVILAKKFISQSLDGSFALNKWVGPGNPANWRKNNLFS

SEQ ID NO: 105585 - protein, 197 aa, Unknown
  Obtained from environmental sample
  misc_feature (1)..(197): Xaa is any amino acid
MEFEKFVPAFGRWYSDGKKTACLVGIRSDESLNRFRTIASRDKTMLSDLNWTTRIAGEEELYNCYPIYDWRTEDVWIANAKNDWEYNRLYDLYYKAGVPLSAQRICQPYGDDQRAGLNLFRVIEPETWARVVNRVSGANFGNIYSGNSILGYRKVKLPKGHSWRSYTKLLLASLPKTLADNYKSRFIKFILYWKRVG

SEQ ID NO: 105586 - protein, 249 aa, Unknown
  Obtained from environmental sample
  misc_feature (1)..(249): Xaa is any amino acid
IPINDLKLPDTEAEPLTEAEPVAETEPVTETTAEVDIAGGIDDLNFSDLINALPGDLSVPDIDDQSASAEDSFSPPDELLSDLPDELGPVPPADSLESDSGSNLDTLDNLDNLEKFNFPDPPDTPASADAPALADAQEDAPIQEDASAQADEDGALDLSVFDDLGDFGNLSASRSPDTSSGDIPDEPPPPELDGLDALGDLDLPEPQPSPQPSARERRTGSPLEEPAAASEGETPDFSGFDLPEEPAAA

SEQ ID NO: 105587 - protein, 94 aa, Unknown
  Obtained from environmental sample
  misc_feature (1)..(94): Xaa is any amino acid
MAAKAVAEATELANTSGQALTEIVDLAAANSAIVASIATAAEEQSATSEEISQSIEEINRIVGETADGMTQASSAVQELSRMAQELNKVMNELH

SEQ ID NO: 105588 - protein, 242 aa, Unknown
  Obtained from environmental sample
  misc_feature (1)..(242): Xaa is any amino acid
MSLNGEELFGKELMETLVSEFEKKNPDIRLIFADSDTDIEPDVLFFIEGDYSALIAADALTELNSFTNYESGARQMAIPLVSFMDMLFYNIDILTAAGFDHPPKNRDEFIAYARKVSRGNYGAAGYALSLSQNDRQALSRDIFSWIWAAGGSFWPEEEVTPTITRAITNDISFFGVLNREGILAPDVFETTGDKRVEAFINGTTAMMIASTRTIPYLRARMGDDTFGITTIPDPGSGGKYSI

SEQ ID NO: 105589 - protein, 145 aa, Unknown
  Obtained from environmental sample
  misc_feature (1)..(145): Xaa is any amino acid
MNESSLHRKLKYQYAGKGGKTEVSAGEYVADGRRKDGEYIEVQTGSFGPLKDKVKELASSGSVRIIHPVAVKKIIEVYKPGDPCGSLLYRRKSPLKGSPWDIFDALLSAPLLPLIKGLSIEVVLVDILEKRIKDGERLMAQKRDQ

SEQ ID NO: 105590 - protein, 79 aa, Unknown
  Obtained from environmental sample
  misc_feature (1)..(79): Xaa is any amino acid
MTFNEYFIVFPEGDVQEVEGRLPFNSIVDVNGNVLYPPLPTNKMIAFKVIGIRNEEKKGIIETYHFLDLMSAEELTEYT

SEQ ID NO: 105591 - protein, 241 aa, Unknown
  Obtained from environmental sample
  misc_feature (1)..(241): Xaa is any amino acid
MPDKLFLNRLSAEEFTSTVLDISGGGKVLIISDFHMGSGLRDDLNRNGEMLICMLEEYYFKNGWILVLNGDIEELLKYSLDYIREKWTEMYRVFNLFLSENRLYKIIGNHDEPLLAKKNSSSPYPLHSVIKIETGIVPAFVFHGHQLSNIYNRYDKLIGLGIRYVIKPLGIKNLSAARSPHKQFHIEKKAYDFSLANNCLSIIGHTHRPLFESLSRFDYIKFEIERLCNNYPLSQGEARIQ

SEQ ID NO: 105592 - protein, 248 aa, Unknown
  Obtained from environmental sample
  misc_feature (1)..(248): Xaa is any amino acid
MGRILDPNLKEVSIELRSLDGFTIPANLRSRKLDSGSMMRENIDISAMADGQYNVAVIAVDRAGNMTRLSRNVQMARQTYRNYIEILYPLENEETSGEFNLYGYAGGSTPAGTVTIKINGADSQTAPVDDAGYYAFKLNSEFLKTGDNAITVTSNFGGPTLVSSRPYNIVFRDGGPWVTIDSFKFAEFSYDRAYLSGRTGYEISDADKELLADKKLDKEVRAAILAKTPDFTEISFDNGRSFMKTSKA

SEQ ID NO: 105593 - protein, 154 aa, Unknown
  Obtained from environmental sample
  misc_feature (1)..(154): Xaa is any amino acid
MNAAPEPPFSRALPWVLLASFAFLLNYLARSIFGPLLPALEQEFGISHAASTRLLFYLSAGYAFSLFLSGFSTSKARPRIMIAGALLASGLALLALAALKSLLFLSIFFVCLGLAAGQQLNAGMIAIRSLTPPSQWGASFAVHEMGPNACLLLG

SEQ ID NO: 105594 - protein, 209 aa, Unknown
  Obtained from environmental sample
  misc_feature (1)..(209): Xaa is any amino acid
MQVQIRRVEDAIKDAEDKYQRVERKSKTLQETNDGIDRNFKILQEDEQLVKRLENTISTLKIDMDAIQNSVQTLSAENEKARDAAEKLSTLDETVKWLEKRIAEMNVARESMARLATELQNLDKDAQNQLNLTRSLLNREEGKIAGRAAGKSAGKAAGRASDDSAPPPRDRENIIKLKRQGWTIDEIAGAMKISKGEVELILELGPKEM

SEQ ID NO: 105595 - protein, 246 aa, Unknown
  Obtained from environmental sample
  misc_feature (1)..(246): Xaa is any amino acid
TFGPVGSSGGNITINGGNIKATAGIDGYVRIWDFINGWTSRFNVGGAGIGGGACGPGGNIIIYGGDIEATGDYGGAGIGGGGAGGAGGKITIYGGSGIIQGGDNDSLREGSYIEGASGMGGGGGYIIPDLNPSFQPTAGADITIYGVYTALTDEDTITTTDGTFTVRGGVGVQVNAGRPVHTDKILRQNGFYEPAKPGEPAKPGEPSDPSGKVWSHTQTLNTLREIAQFYNVNGVFSVSSPQAITI

SEQ ID NO: 105596 - protein, 230 aa, Unknown
  Obtained from environmental sample
  misc_feature (1)..(230): Xaa is any amino acid
MDDYTIDKERRMKGNYRFSALIIAALIAIPAGYGQSQSSGSEMSVEESYLQEAVDLMIVRETSKQDSIEQKLISLAFISDLIGQGNTSDEIRLVLERLSFEGTNVQARERGRLKNDYPEVRRQAVRLLGSFNSDEAKATLLRVCVTDNEPLVLQEAVRSLGQIGIDKDGEVVSTIVWVTNKFTNTINPDNLLALAAIDAIQKIARNNNGVREDAFNLLIQISEGPYSPPI

SEQ ID NO: 105597 - protein, 194 aa, Unknown
  Obtained from environmental sample
  misc_feature (1)..(194): Xaa is any amino acid
MDNIFKYATSEFSNDAFLCWLFSISKNVNSNINSIDYRVSQGYLNEFCKYNGKIIIYEDGIVKQENKIDVLIKGKYDNGEEFILAIENKTSSREHSNQLKRYKDYIDKNYNHIKNRHLVYYKTAIQSDIYRIINEGYSVFQIKEIYDLLIKYGAGKSENYILKNYFDSIKEEVELFYNFKKSRIIEWDDKAFQG

SEQ ID NO: 105598 - protein, 258 aa, Unknown
  Obtained from environmental sample
  DOMAIN (101)...(258): DNA / pantothenate metabolism flavoprotein
  misc_feature (1)..(258): Xaa is any amino acid
IVAPCSAHTTFGIAHGRAESIVEAAFLATRAPVVLFPAMNVHMFEHPATQQNLQILADRGARVVDPAFGALACGYEGKGRLPDTDLILEEIAYVLSPRRDMTGKRVLVTAGPTREYLDPVRFLSNPSSGKMGLAMARTAWYRGAEVRLLLGPVTAPGNTHGIAVQNVISAIEMRDAVLENLDWADCIVKAAAVGDYRARDQAGQKIKRGTANELSLVLLQNPDIAAEVGMKNRDNQLLIGFAAETDDLVHNARAKLER

SEQ ID NO: 105599 - protein, 253 aa, Unknown
  Obtained from environmental sample
  misc_feature (1)..(253): Xaa is any amino acid
VYLDDIQVVGARYIINFDANGGTVKRTVDTTKTEARKLDSLPIPTRDRYAFNGWFTSSDGGTQVTTSTVFNRSTTLYAQWIPIYRITFDANGGSVSPTTGSTGMGGMLASMPTPTKSGSGFNGWFTSTTGGEEVTTSTVFSGDATVYAQWTQNPYTVTFNANGGTVTPASIAARGDGTIASLPTPTRAGYTFNGWFTSSTGGTEVTADRVYSANTTIYAQWTLITYTIYFDANGGEVTTESGVTGTGGKLTSL

SEQ ID NO: 105600 - protein, 104 aa, Unknown
  Obtained from environmental sample
  misc_feature (1)..(104): Xaa is any amino acid
EGGYVIIGSFAVAAEIGKIPDDELRMAAEKQYKRIIFDEVESTSQIIERADKLNFMGLGPMDARHLAAAEAAGAKFLLTTDEKFIRKCQNRNLTAVKVINPMDF

SEQ ID NO: 105601 - protein, 278 aa, Unknown
  Obtained from environmental sample
  DOMAIN (133)...(278): HD domain
  misc_feature (1)..(278): Xaa is any amino acid
KMIYKIFSVQINEKSISGYCAYKRTLINIPDMYNIPPEMPYKFLSDFDVITGYKTVSTLTIPLIATDQRLMGVIQVINAKDKDGNIIPFSSDDELILMHFATNATMVLQRAYITRAMILRMIKMAELRDPKETGTHVNRVAGYAIEIYDRWAYHHKVPIEEKDKFMDSLKISSMLHDVGKVAISDTILKKPARFTPEEYQIMQNHTIYGARLFYDTNSPVDILARDIALTHHENWDGTGYPGWIDPHTGKVERTNDEGKPLGRKGEEIPLGGRIVAIA

SEQ ID NO: 105602 - protein, 246 aa, Unknown
  Obtained from environmental sample
  misc_feature (1)..(246): Xaa is any amino acid
AITVVGHVSPEFLPACPATPASAAVDVEFLPAPSFVAVAAGFITGETITVVADDDGEAESSDDSAEEVPTVGDEDDGLQLVDNSDDSEETGAVIDDVIDGVIVGAEVEEPVIAAADGDDGSEPTDPSDSDDAAEPDDSGSSNCSTSKTLTNQVVVSSDTAQPDNAVGPTSASFDTTVVDQQVEPEVVNPSNPGGGTGAANRGNGLNQPSPVPVPAAPLPAPAPPAPGAPSITGVGPVANPARPSAI

SEQ ID NO: 105603 - protein, 238 aa, Unknown
  Obtained from environmental sample
  misc_feature (1)..(238): Xaa is any amino acid
MMIVARLQATRNRNADLAYENAEQLLKDLRTVQESLVEAGARRVAYGQLQRLIWQVETFGFHLAEHEFRQHSQVHDAALKDIAEKGALSPDLDPMTVEVLDTFRTLGAVQAKYGKKAARRFIVSFTQDASHLAAVYELAEHAFPDPDDRPIIDAIPLFETFNDLENSVTILEQMLQMPQVQKRLAENGNRVEVMLGYSDSSKDVGPVAATLALHSAQKRIQKWAADNNIKLTLFHGRG

SEQ ID NO: 105604 - protein, 260 aa, Unknown
  Obtained from environmental sample
  misc_feature (1)..(260): Xaa is any amino acid
AYTPNGNVPLYALWSDEAAKYTVTFDGNGNTGGTVPTAVTQATADEEITLPGAGNLVKTNSTFKGWSSDGKAPALAEGAKYKPLSNTTLKAVWETAGGGGGNPNEPNPGDFTSNATNAEIMYLENAAVAAYQFNIPAGHTYGDYEAVSVDYLVDSTWFNKPLRHARMYGALDPNTFMTDSNGTVYAPFSIYNEGQNGIIAAPGNGGAVSNGDTAWQGKLGATAADAWFTVKYKLDASEKNSSYNVARDKPDEDATGTFYL

SEQ ID NO: 105605 - protein, 197 aa, Unknown
  Obtained from environmental sample
  DOMAIN (1)...(54): MutS domain I
  misc_feature (1)..(197): Xaa is any amino acid
MCGIPYHASRSYISRLLKAGKKIAVCEQITEPGKGLIERQVMEVITPGTTVDEDFLDKGNSNYLACFASVGDNFSFAYIDLSAGDFFATSFPADGAAEKLRQELERIRPREIIVQESLLNENPILAQAVEERGGLVNRWADWLFDSARSREKLEGQFGAQSLKGFGLSQFSPEIVSSGALLDYLSDTAQSPYPHVRF

SEQ ID NO: 105606 - protein, 262 aa, Unknown
  Obtained from environmental sample
  DOMAIN (25)...(136): Eco57I restriction endonuclease
  misc_feature (1)..(262): Xaa is any amino acid
LNYQILNKNFITDTGAEIAWGINKKYDIIIMNPPYQKINTNTIYKNVLHDISIDTVNTYSAFIAIGIKMLADNGVLTAIVPRSFCNGLYFLPFRRLLYDNTAIKHLHIFESRKDNFKEENVLQENIIIVLKKTKDKSGNVTVSYSKEKQFSEFLEKDVTPDDVINTNDTQYFISIPNLNQKSENIPLTYTHKELGFEISTGPVVDFRVREKLKYDTSGVPLLYAVHITNRKITWPVDSKKPNTILLDEYEKTKICFKKGYYI

SEQ ID NO: 105607 - protein, 259 aa, Unknown
  Obtained from environmental sample
  misc_feature (1)..(259): Xaa is any amino acid
MIAVDPDDPNTVFVGTNLCVYRSKDGGQTFEAMTHWVAHGRLYTHADMHTAAWAKSGPKALYAGTDGGLSIFRQPNIEPIPKSSGPMMSNPAIIDHRRNKNISTQLVYNIACTTAETPPGSRSRILVGFQDLGTRLRLESGVATGTFNDVIGGDGFGCLIHAHNGDLMLGSYYNTNIFRSADGGNSWTYCGINDGPFYTRLFDTPADPTGNRVYTFTPEIPYVSDDFGASWTPLPTTGNGWLSGNGREYEIRSFGVSPL

SEQ ID NO: 105608 - protein, 270 aa, Unknown
  Obtained from environmental sample
  DOMAIN (1)...(227): Homocysteine S-methyltransferase
  misc_feature (1)..(270): Xaa is any amino acid
LVLGEFGLADRAEGLNTLSAKLAREVASSYDNPRFVIGSVGPGTKLVTLGHVSHAELFQSYQVQMRGLIKGGIDAILIETCQDLGQMKTAVRAAKAAMAELKTSVPIWVQATIEANGALLVGSDLQCVLVSLEMMGIDVLGMNCANGPDEMARHLGLLADQSPFPISCLPNAGLPVNDNGNLVYPMGPDAFAEKVEKIAVQFRLSIVGGCCGTTPAHIRALKPKIEKLPAPLRTPKLERHASSLYQAVPLHQEPRPLIVGERTNAKAAKN

SEQ ID NO: 105609 - protein, 249 aa, Unknown
  Obtained from environmental sample
  misc_feature (1)..(249): Xaa is any amino acid
MALDWKAFVNFGGKDEISGAVDKARKTTEKASKGMGDGLRETGKHADSLREKIGSIGDIARGVAIGNLITKGVTMAAGAVKNLVLSVDEFAQRADNARMSAMKIGLSAEGFQKLSYAAASAGVSADKLQAGFNSLNKNLGSGGLVKFLADTDKALLSQVKSAKSNTEIFSIMADAISKENDIAKRAALGASAFGKSWAELYPMLSQSAEGIQKIADSEKMLSALNVNIESGGLVKYLESTDKALLSQVK

SEQ ID NO: 105610 - protein, 194 aa, Unknown
  Obtained from environmental sample
  misc_feature (1)..(194): Xaa is any amino acid
MLTLTLIDIDKDDKGAPRVHFLIKRSVGYPGDRIRFDKGDIKIRFSGEDRWIDEKDYNAAMGWKHNISRLMPIEQYPALYAAAKATGWADMKQNPSENLLSQASELKEIHYDYIAYESTRIETWRKAFPGDARYAALLAKKRLGWYVPQGRVLPFGDNRDNSTDGRVFGPVKESKINGKGMIVYWPIWRLGKIK

SEQ ID NO: 105611 - protein, 185 aa, Unknown
  Obtained from environmental sample
  DOMAIN (16)...(181): Protein of unknown function (DUF558)
  misc_feature (1)..(185): Xaa is any amino acid
MKQFVLNSKPDKNGQLRFEGGDYRYLARVRRLAPGEYFPALLPGAVDSVSVRVLSVDKHVLIGEISKEKPVSTGSSVSGNKLPPMLLFQSLPKGEKMDLIVRQAAEGGIEQIVPFMSEFSAVKNIGGLKFTRWERIIKEARQQSGSLAPTVIRQPLSIDGLFTFWEEIKTQNPGALGLLFHHLPL

SEQ ID NO: 105612 - protein, 253 aa, Unknown
  Obtained from environmental sample
  DOMAIN (11)...(108): DnaB-like helicase N terminal domain
  misc_feature (1)..(253): Xaa is any amino acid
MALYLDILPDKLPEDLDAEKSLLATLATCFLGRGETPEAHKALDMLRPEHFVHPHHRLIFEAMQQLYHSGGEIGPLTIKAALDGRNQLERVGGLLGIGEILMSDQVGDPMVLATRLCELWQSREAGRIGAVLTRKATNCFGDPSEIIAGARDALSKLSQSGSKAEIESLEWIVSRIEAAEPFCAQGSEKLARFGLPAFDNAIECSAEHVVAIAARPSIGKSALAVQVQCETALSGTPSLLISLEMNRDEIDSR

SEQ ID NO: 105613 - protein, 275 aa, Unknown
  Obtained from environmental sample
  DOMAIN (28)...(207): DHH family
  misc_feature (1)..(275): Xaa is any amino acid
FLEDDMRYLHNPFEMPGMEDAVERILAAKEEGEKVLVFGDSDVDGITGTVLLTEYLAGMGMDVTWRIPGGEDPYGLSIKAVEEFAAAYGTLIITVDCGISCVNEIRRAGELSVDVIVTDHHEPQEQLPQALAIINPKLKDADLSTPPYPFKDLSGCGVAYKLVSALRFARKSELYGQPVCLLNTRPVNNAWIVEAAKMRNLAVIGTITETIIPGMVPISDTRLPAFLEGQQILVWDAPQQKRTLAKLFGNSVEVGMLDIAPEIGKEIPQVAGQSL

SEQ ID NO: 105614 - protein, 91 aa, Unknown
  Obtained from environmental sample
  misc_feature (1)..(91): Xaa is any amino acid
YALAFGDGVASLAGKFIGNLRPAFLCGKSVEGSIACFIAVFISAYFVSGSINISVMAAFTAMAIEALPLEDYDNMAIPVTVGMIVQLVSLW

SEQ ID NO: 105615 - protein, 162 aa, Unknown
  Obtained from environmental sample
  misc_feature (1)..(162): Xaa is any amino acid
MRRGCRQLFILARLTAAAWCVCVFTAAAQTSSEGVDTGAGISIDKIGADTAIGAGINNAAQPNGIAGRARDDGGPAGTGIDNRSDFIDTYADTSINADVHNKNSPKYKFALILSGGGSRGLAQIGALAALEEAGLKPDLIVSTSMGSVVGGLYACGYTASQI

SEQ ID NO: 105616 - protein, 282 aa, Unknown
  Obtained from environmental sample
  misc_feature (1)..(282): Xaa is any amino acid
MELERAKLEASVNAEIAIALKMATSPLVQRHFINPADSDLRRIAFEEIDGYRRAFKSNSVFWSSNADKEFYFSEDNHYTIDAENPDNYWYKMTLYETEKYNFNINYNAELQQTLLFINAPVFDEQHTPIGLVGTGIDLSEFVNNIYQNYKGGAALYLFNSQGEITGSKDVDQIKNKTMLNKALGDTGRIILERAKSGESQYFSVSEGVATVIGVPSLEWHLTAILPITIADTLKSGMTLLFLLMMAAIAGIIIISYLFIAGLLRPMKNMVKTLDEIANNSDL

SEQ ID NO: 105617 - protein, 256 aa, Unknown
  Obtained from environmental sample
  DOMAIN (56)...(239): Metallo-beta-lactamase superfamily
  misc_feature (1)..(256): Xaa is any amino acid
LASLCFAQQKSIVLDGGIEITAIDDQPREMDASLFSGKLTEAQKLAYMPGGKTPASVNVFLVKTGGKTYLIDAGFGNAVKDKRIDPKKIDVIFITHEHGDHISGLLKEDGTANFSAPVFISKPESDYWLKKETPNSDLQKKLSNVYASRYKTFNFGDTLAPGIVTISAIGHTPGHTAFLIGNGKQKLLIAGDFLHAAALQFPEPTESASFDMDKEQAVKTRISLMEQAEKNGWIIAGIHVPNPGWGKVKSNGKGGF

SEQ ID NO: 105618 - protein, 135 aa, Unknown
  Obtained from environmental sample
  misc_feature (1)..(135): Xaa is any amino acid
MLKQISIKNLALIAGAEISFSNGFWAITGETGAGKSVFLSALKLLCGAKASSEQIRNGEECAVLKGIFNIEKLSDAKEFLQEREIDFEDGELEIQREIFANGKSKARINGVISSTRDLQELGEKLVQMHGQSEQT

SEQ ID NO: 105619 - protein, 263 aa, Unknown
  Obtained from environmental sample
  DOMAIN (1)...(262): Adenylosuccinate synthetase
  misc_feature (1)..(263): Xaa is any amino acid
MEKLRARGVDVLGRLLLSSGAHIILPYHIALDKWRESLADRIGTTGRGIGPAYETKAARIGIRLGDLKNQRGLLERIGNLHKEIGLIIGGLEALPNAESVLTDLNSLSKSLIPCIGDVQAHLFDSWKKGESILFEGAQAAMLDIDHGTYPFVTSSNCSIGGLFTGTGLPPKALHKVIGVAKAYATRVGEGPFPSELDGPIGENLRQAGHEFGTTTGRPRRCGWFDAVLARHACRLNGTDGMCLMKLDVLDGFDRIGIVKGYWH

SEQ ID NO: 105620 - protein, 213 aa, Unknown
  Obtained from environmental sample
  DOMAIN (136)...(169): Tetratricopeptide repeat
  misc_feature (1)..(213): Xaa is any amino acid
MQNNEDGNITEKINDFIKINRKAIFITIGILFFLFIGLIAYLSINDALDKKAIAAIDELCDRYDELTLVSDEDFYAEDLENLLADFKTFAEKNKGFAGSKAWYVIGQIYSGKKNWHLAQDAWLSAAKTGNNTYLAPMALFNAAAAAEEQGNLEQAIDLLKQCIAHKFEFPAAPRAQFSIGRLYETLGDSTTAVEAYRDVLIKWPEMPVWHNLA

SEQ ID NO: 105621 - protein, 228 aa, Unknown
  Obtained from environmental sample
  DOMAIN (1)...(119): Elongation factor Tu GTP binding domain
  misc_feature (1)..(228): Xaa is any amino acid
MITGAAQMDGAILVVSAPDSVMPQTREHIILARQVGVPNMIVFLNKIDLVDDAELLELVKEEIKDVLSQNGFPGDKTPIIEGSAFKAMSELAEGKPSEETTKCIEGLLEAMDAYFPDPVRDSDKPFLMPIEDVFTISGRGTVVTGKVDRGILKLNEEIEIVGIKPTKTTVVTGIEMFNKLLDEAQAGDNVGTLLRGIDKKEVERGQVLAKPKTITPHKVFKGQIYCLS

SEQ ID NO: 105622 - protein, 173 aa, Unknown
  Obtained from environmental sample
  misc_feature (1)..(173): Xaa is any amino acid
MNKKILNHVLTEFPGKMVTVNNHKIHIYTEGEGSPNLIFMSGSGTYSPMYDFKALYSKMSNEFRITVIEKAGYGFSEISNISRDIDTLLYETRTALNEVNINPPYILFPHSMSAIEALYWVQCYPDEIKAIIGIDPALPPFYKILNITPIIKKMKTLSKIFNSYFKWLLPLMQ

SEQ ID NO: 105623 - protein, 269 aa, Unknown
  Obtained from environmental sample
  misc_feature (1)..(269): Xaa is any amino acid
EHSKTRHEKDDRRAVGDRSNWVLGFNNREKLALFQRRAQELADAISALNAKINALSEQDNLNAKRALQCQTLVNLQWQEIDVLPLVERISAIEKQIREMRDGNKVLQEISEQIARQKSLVLHADEELRAARIEHDKTLGELKKSNDELSEKQNDPSIVPLTPFQKKGLDEHFARIADIRLDNLDRITMSVSQKLSNEKEEVNGGIAKCEKQVESVFTEFKRNWPLDAGDLDTSLSSAPDFFSKLTRLETDGLPAYEHRFFDLLRDQSNQ

SEQ ID NO: 105624 - protein, 256 aa, Unknown
  Obtained from environmental sample
  misc_feature (1)..(256): Xaa is any amino acid
DLEDGETYSVVITATARGYSFDSAVAVEELSPPVEFDDAPTLTLAAGEKKITYTFTASDPVADSYDIHYSEGSDVDETYLMTSGTVIANVSSDGEITGLTSGTTYSVIVVAKLDGYPDTASNKDTATPYGFTNAPSLSLSLGGSGEINYTITPSDPAAESYTIYYKAGTDLTAEAIKGDNVTKTVTPPTLTGTITGLINGTTYSFVVTATNTSDGGWTSIDSTVETATPNGFTAPPSIALVPGSSATELAYTITAS

SEQ ID NO: 105625 - protein, 137 aa, Unknown
  Obtained from environmental sample
  DOMAIN (41)...(137): Response regulator receiver domain
  misc_feature (1)..(137): Xaa is any amino acid
ALPLHSEISWDDDESNLSESRLQEADNIDMDALNDEELEKPVILFIDQDKESTALASTVIENVYDILVVENGEQGLITALNQKPSLILIDSHLPGLDGYTMCRILRSLDETKNIPIAIFSAGVRDDEIQKGFSCGAD

SEQ ID NO: 105626 - protein, 93 aa, Unknown
  Obtained from environmental sample
  DOMAIN (8)...(31): Prokaryotic N-terminal methylation motif
  misc_feature (1)..(93): Xaa is any amino acid
MSRFFKKQGFTLIELMVVIVIIGVLASLAIPRFTEASSKAKIAEAPRVLASYESGYLAALAETATPSALNADDLIFEAPTDSKWFTYTVKQSG

SEQ ID NO: 105627 - protein, 271 aa, Unknown
  Obtained from environmental sample
  misc_feature (1)..(271): Xaa is any amino acid
AINEATQLYTQASEILGDRPILVPKLHEMPGLTYMQLKAEGLDQFSNTVIQLENYIPPPPPIKVRFWRAKQAPSRYYYYHYNYNYNYSYNSSVEAVPHKSVQLLRMAPALHYFCIPRNERLISYWDIVEDRLFKIRNSMNIDGVKRSITLFAPPIDPGMLARASAMGISIGALLRDMQSTPTAYRFATVFQKAVELCNELKAFGSELLSALEKKDAEALAFLRSNHEIELLKLVKDVKKKSVDESIQNLEALLRTKAITEERYNYYKEIER

SEQ ID NO: 105628 - protein, 242 aa, Unknown
  Obtained from environmental sample
  misc_feature (1)..(242): Xaa is any amino acid
MVIRKHVKEEFPGGDFPEMKIIIATTFVRHPSEDPAITSLRFLMHHAREHSSKLMQAAMGNTTESSKFNGSLSSIQEFIGPLETVTELITCPQELDHDDFKHRENTYYVEPCILDTNPSCKLIDRDADLIYATAGSRVRDYVQSAKTMFQTLQRMINIAAAKNKKLEMAVGYALAEEFVSTGRITITEWADQTYSLKRAQSAVVHGGLASIKECIYFGIAPVVVPMGKDQMDNALRVINKEV

SEQ ID NO: 105629 - protein, 186 aa, Unknown
  Obtained from environmental sample
  misc_feature (1)..(186): Xaa is any amino acid
GRLTAYRYPEREIVQVNAKHEYYAPVKPFLNKESVGSDDMLNIDDVLGQKNLNTRLRRSIRINAENSAAALELMSRFAADPHWLVYLPPTMSPCETSKLPAYLEYPSEAFDYYKTRGVGKVVCEQKHMGSRSVVVLCKDPETAAKRFGVADNSFGIIYTRTGRRFFDDAETEMALLARFQKVLCES

SEQ ID NO: 105630 - protein, 101 aa, Unknown
  Obtained from environmental sample
  misc_feature (1)..(101): Xaa is any amino acid
MATIGAYPGREMFSQIMSQMRTTVETAFYGNNVRPVENVAEAYHLAMAAPGTVVLDGMPVYRPEALGLPSDAKVLLMNDGAVSGRAAAARRILGWPGVDKD

SEQ ID NO: 105631 - protein, 181 aa, Unknown
  Obtained from environmental sample
  misc_feature (1)..(181): Xaa is any amino acid
EQAIRIINSLISARSKTRGKDKEGEERVEYIADRLGIVKEDVIRVIGLLREEKILADAKDLSVYIKKRERINRSKTILDTHINIEKFLFSYLDENERKYNIKEMNEALAAEYAGTSIRQLGTILNYYAIKHLVKRTREYKNYVTLKPYFSMAEMRSRSNKRFEIAKVVIEYLVSKIQTSRM

SEQ ID NO: 105632 - protein, 65 aa, Unknown
  Obtained from environmental sample
  misc_feature (1)..(65): Xaa is any amino acid
MQYKNEIIPIEVKSGKHTQAKSLKVYMEIYKPKTAIKISMNNLGAATGLHSVPLYLIESLADILG

SEQ ID NO: 105633 - protein, 64 aa, Unknown
  Obtained from environmental sample
  misc_feature (1)..(64): Xaa is any amino acid
ITEGGLSPVSCLADNPNQCDKQAECKTLAVWQGLEKMINQYLDGITIQDIVRDYQEAGANEYYI

SEQ ID NO: 105634 - protein, 88 aa, Unknown
  Obtained from environmental sample
  misc_feature (1)..(88): Xaa is any amino acid
GTVEKFKGDYEHKILDNSTIGNYSDLPGYVFDRLKNGQMRYAHFSDLLRLNLLKNHGGVWMDATCYMTDFIPERITDLDFFVFLTGEW

SEQ ID NO: 105635 - protein, 189 aa, Unknown
  Obtained from environmental sample
  misc_feature (1)..(189): Xaa is any amino acid
MRSILKKLLKLITHAQVMSVFLAFAVMVFFSYNFMAGIERRHLMDKVNDAIKATQEKINFELLESETTLNVVSETVRSMILNGSSFDQIEEFIKSITSFMLEDARLASYTTGVYAFFDIFGEKFCDGIGWVPPDDYDPKSRPWYKTAVETAGNIGVTQPFIDIYSDSISVTFVRRIFDNNGNPLGIVLS

SEQ ID NO: 105636 - protein, 193 aa, Unknown
  Obtained from environmental sample
  misc_feature (1)..(193): Xaa is any amino acid
MNLAGTVIRGNSTDLWIDEGLSVTAEWVYLGEHSERLIWYNENGNGNQVKGLIDKGNNFFVWGNREEENQYAVLDDYSTVYLFFQWLRLQSDKEIYCKISASDDYDYNAVINAFNDTVTDNQYGDWETMLKDWLAANYFNNSTGRYGYKDEKDLKNIKIHYAPGGSKTINLFPGEGVYSMVKESTPIPTSSKN

SEQ ID NO: 105637 - protein, 207 aa, Unknown
  Obtained from environmental sample
  DOMAIN (5)...(207): Transketolase, thiamine diphosphate binding domain
  misc_feature (1)..(207): Xaa is any amino acid
MDTKALEKVALSIRSLSMDAIEKANSGHPGVCMGAAELGAILYGELLRHDPSDSKWPNRDRFILSAGHGSMFLYSVLYLSGYKTITMDSLKSFRQVGSPAAGHPEYGMAEGIEMTTGPLGQGFASAVGMAIAETMLACRFNTPGHTIVDHYTYVLAGDGCFQEGVTGEASSLAGHLGLGKLIVFYDSNKITIDGATDLSFTEDVAKR

SEQ ID NO: 105638 - protein, 190 aa, Unknown
  Obtained from environmental sample
  DOMAIN (154)...(186): Ankyrin repeat
  misc_feature (1)..(190): Xaa is any amino acid
MKKNKIAFFALFIMFLIVSCGKSSVYKLYSACIEEDIASLENLLNEGVPPDSILENKYKYEIANKYIDKSEQKFSNDHDKNQYVDNFSLSPLAILSSLGNVKMADLLISFGANINGLSGMYLSTPLLHSTLANNTDFSLFLLDNNAEIDTANNGGFTALHYAAYNNNFKTIERLIALGANVNKLDNYGQS

SEQ ID NO: 105639 - protein, 161 aa, Unknown
  Obtained from environmental sample
  misc_feature (1)..(161): Xaa is any amino acid
MALCRAGLDVQYTQGFNPLAKLEIVSPLSVGISAGGEIAAVEFLHALQPNEFLEKMNATLPEGLTITQAECYCIPSGGKKHSLSSLLWGFGYAGTDGETIYVPAAAEKAHREKHLSSGGTLFSLRRSCVLAKNLIEGNQTSGQPWSSYFDIYGYLYKGNGE

SEQ ID NO: 105640 - protein, 222 aa, Unknown
  Obtained from environmental sample
  misc_feature (1)..(222): Xaa is any amino acid
MIPNSLTDFLFDSLVDYNTIFPYHGSMIGFLIKKAFFDFWDNMLRMILVNLGFIASLTIPVFLPGLIPIPILSLLVFAAGLLWCFVYLAAAALSVKAVSDYGIFGFSDFLTNLKKGWKTGMALGITGFLLYVIATNAIPFYLRLNSLFGLFLAAVIFWTIAAAIFSLQFFLAIRARLDTKLVKVFKKSFLVFFDNPGFAIYSLLHTIVILIISAVLALLLPG

SEQ ID NO: 105641 - protein, 256 aa, Unknown
  Obtained from environmental sample
  misc_feature (1)..(256): Xaa is any amino acid
MDNVSIEGRYFGIYRARDYPRTGMIYRIDWLENVGMAVPKTLDDLYNVLRAFTYNDPNKSGKQDTFGMNWCTYMGPFNTLAVMHGAPTRFGDRNGKLTPWFEYDEFYEAMVYSKRLYDEGLINKDFAATSTGDWALAFGRGQAGWHIDVADEASRSAVRLRDNGLMTQADFDAGKYVGVMGAVANKAGKTYVYPANDGHQGYVAISTVGAKTIQDLAYYLDFMDKCNSATGSTILNWGVEGVNYSKNPDGTLKVIT

SEQ ID NO: 105642 - protein, 116 aa, Unknown
  Obtained from environmental sample
  misc_feature (1)..(116): Xaa is any amino acid
MKSKPVALLLSDLGVVRSHSRPHVSDDNPYSESQFKTLKYCPAFPERFGSIQDARAFCQEFFRWYNDEHRHWGIGLMAPGAVHRGRAARITELRGETLYAAFGAHPERFVNGRPKP

SEQ ID NO: 105643 - protein, 273 aa, Unknown
  Obtained from environmental sample
  misc_feature (1)..(273): Xaa is any amino acid
IPVYEELAIRIEFFGDEIESIQTLHPLTGEVIRAEQSVYLFPATHYVAGPERMERAIKGIESELTERLAEFESQNKLLEAQRLRMRTTYDIEMMQQIGTCSGIENYSMHIDGRERGTPPHTLLDYFPEDFLLVIDESHQTVPQIGAMYEGDMSRKRSLVDHGFRLPSAMDNRPLRWEEFVDRIGQTVYLSATPGPYELSLSDGVVEQVIRPTGLVDPEVVVKPTKGQIDDLLEDIRVRTERNERVLVTTLTKKMAEDLTDYLLERASGAVFAF

SEQ ID NO: 105644 - protein, 215 aa, Unknown
  Obtained from environmental sample
  misc_feature (1)..(215): Xaa is any amino acid
VRVAQGLRLPDDRYGEYRLILEAAVQHFEQEGIPAMVCNAYHIKNVPGRKTDVADARWIARCLREGLLNPSFIPDREQRELRDMTRFLKSQTEERARNINRLQKFLEGANIKLSEHVSDIEGMSATELLDLVIGNPDFTLDDVRQRMHRNMKSTPEQLFASLEGYITPIQRKFFAHVMHIIREQTSQLEETKALIDSVLSDNYKSAIAAWTKFPV

SEQ ID NO: 105645 - protein, 169 aa, Unknown
  Obtained from environmental sample
  DOMAIN (2)...(167): Protein of unknown function (DUF1016)
  misc_feature (1)..(169): Xaa is any amino acid
NPEREWYALKALENGWSSNVLNHMIEMQSFERKGKAVTNFEGTMPPKESDMAVQTFKDPYLFDFIGTAQARREAEVERALVEHMEKFLLELGQGFAFVGRQVHLEVGGDDFYIDLLFYHLKLRCYIVVELKARDFKPGDVSQLNMYQNVVNDVMRHPDDKPTIGLLLVK

SEQ ID NO: 105646 - protein, 272 aa, Unknown
  Obtained from environmental sample
  DOMAIN (74)...(209): CheW-like domain
  misc_feature (1)..(272): Xaa is any amino acid
SKEAAEALSRKELINYIFQSGFSTAAKITNISGRGVGMDAVRNNIERIKGSIAVTSKVGEGSVFTLSVPLSLASMMGFPIASGGMKFIIPANFVHTIMLISVKDIITVVDRPCIKYNGKIIKLFYLHNILKIADAAKNMENTSISVVIVQAYEETIALAVNHISSMRQVILKTLPKFMEEMAIFSGVVLTEDYEMIPALHIPSVIRLARKTKAIDLKKRGYDFERMRKSILVVDDSRPTRDIERDILEAEGYKVGTACDGSEALAAAKNFHY

SEQ ID NO: 105647 - protein, 166 aa, Unknown
  Obtained from environmental sample
  misc_feature (1)..(166): Xaa is any amino acid
YRSNQGDRLHAALEAAGAGETGKRFAVVSGEINRLAEDIDVLTRQIREQIEDIQSASSSLIIYSEEGSDRIAEGHKLIKDLEDIFKDIRSSAEIASTQTQTITVSTESQVKSSEQISMKISETSRMLRSSIGANRKAALSINSLTESIQELESFLKKDNRAGEPWQ

SEQ ID NO: 105648 - protein, 102 aa, Unknown
  Obtained from environmental sample
  DOMAIN (7)...(98): Hpt domain
  misc_feature (1)..(102): Xaa is any amino acid
MAIDKSKYIGKFTDEGLENISVVESLLFEIREGYSAQDDLVTLMRALHTLKGSARMLEFKSIETLAHAMETVFSALKEERITLGDNAVRLLLAGLDELKTGI

SEQ ID NO: 105649 - protein, 272 aa, Unknown
  Obtained from environmental sample
  DOMAIN (9)...(219): Elongation factor Tu GTP binding domain
  misc_feature (1)..(272): Xaa is any amino acid
MSLNETPQGERLHIGIFGRRNAGKSSLLNSLTGQDIAVVSEVKGTTTDPVYKAMELLPIGPVVFIDTAGIDDDSELGELRIAKTEKVLRKTDIALLVVDAEEGLSEEDRRLIAVFEDLGVKHLVVYNKSDLIQDTPRGEFCVSCKTGKNIHELKEKIAETGREKENERRLIADLINANDVVVLVIPIDKAAPKGRLILPQQQIIRDILEAGATSVVTREVEFSDTLKKLKTPPALVVTDSQVFGRVSRETPADISLTSFSILMARYKGIWKA

SEQ ID NO: 105650 - protein, 49 aa, Unknown
  Obtained from environmental sample
  misc_feature (1)..(49): Xaa is any amino acid
TGRGYEPVFMIQWASKSFLFIGHSESLFGMKTKFEFVKTEWATLYRKNT

SEQ ID NO: 105651 - protein, 189 aa, Unknown
  Obtained from environmental sample
  DOMAIN (1)...(189): Adenylosuccinate synthetase
  misc_feature (1)..(189): Xaa is any amino acid
DRAHVVLPKYIKIDKERDAARKKPIGTTGRGIGITYSMKCDRDGLRIADLAWKDKMDELDKEDLEFIAPYKERLLAMSVNLSEYLMHHKNSQVLFEGAQGTLLDLDLGTYPYVSSGMSCAAGAAVGGCIGPRAINKVLGVFKAYSTRVGNGPLPSEFDPNSEDELCRFVRDTGREYGVTTGRPRRAATS

SEQ ID NO: 105652 - protein, 197 aa, Unknown
  Obtained from environmental sample
  DOMAIN (3)...(196): Beta-ketoacyl synthase, N-terminal domain
  misc_feature (1)..(197): Xaa is any amino acid
MSRRVVVTGVGVTSPVGNDAGSFWSALCEGRSGIDRVTSFDVTDYPTKIAGEVRDLDFNRYVDPKDIRRNDRAILLGLVAARMALEDSGLNLANEDLGRIGVIVGSGVGGLHTMEAEHIKLLNRGPGRVSPFLIPMMITDMPAGCISMAHGLKGPNYSVVSACASAAHSLGDAFMMIKCGMMDAAVAGGTEAAITPL

SEQ ID NO: 105653 - protein, 168 aa, Unknown
  Obtained from environmental sample
  misc_feature (1)..(168): Xaa is any amino acid
IRAITINGSPKTATIYGWVDPATQTTQLTGGTVLQSYSGGWGVALPGSPYFYDTWDYSNGAGSTNKFTWYGVNQGGGGAFKTEWTAYFLARLGFHWGNGGSYTKYNNIYIDYNFKRTDNTSAGGGFIGVYGWFRSPSATIAKEKLIEYYIVEDWFKDKQVDLADITTF

SEQ ID NO: 105654 - protein, 185 aa, Unknown
  Obtained from environmental sample
  misc_feature (1)..(185): Xaa is any amino acid
SFGTLLVGYSQPAVQYDTITNIGSGTVVLNQPLSSNYDIGKLSATTLAAGAKATFSVRPKAGLGIGNYDDVIAVTTNHANVSAAVPVSFEVVSDPKYEISASDLPSFGSGVVGVYTQPDTQTVVITNTGTAQVTGLKLSTSVLASNYFFIGALSATTLVSGAEATFKVVPKTGLPVENYSEDITI

SEQ ID NO: 105655 - protein, 259 aa, Unknown
  Obtained from environmental sample
  DOMAIN (1)...(63): Phage Mu protein F like protein
  misc_feature (1)..(259): Xaa is any amino acid
MAGRYKGQMDAADDLPYLQYIAVMDGKTTDKCREMHGRVFRADDPIWDTMYPPNHWGCRARVRSLSERQLQRLGLTVESSDGRIVTQTVTVGKGGAAKTKQVTGLKLGNGHTFWAGAGWDSNPGTSLWMPDLNGYNVGDASAFIKGLLASSAYKMWIGKEGKINGMIPVAALPKEHVKAVGGKKHIVQMTADSYRKHRNPGSVHYHKDIGVADYQKLQTIIEDADLVVTDNKGKGSSNTLLFIKKTEGADYYIVPIRPN

SEQ ID NO: 105656 - protein, 232 aa, Unknown
  Obtained from environmental sample
  DOMAIN (79)...(120): Putative Ig domain
  misc_feature (1)..(232): Xaa is any amino acid
MKNVFKVLGIIAIVAIIGFSMFACGGSDDDNNNNNNNNNNNNNSNSGTAPTITTASLPNGTVGTAYSQTLTATGSTPITWSIDSGTLPAGLSLAGTGVISGTPTTAATSSFTVKATNAKGNNTKQLSITIAAGSSGSGGKDVLDGTSWKGNASGQIFLITFNSPNYTYGSVDGTVIASTGTYSISSTIESFGTISGYRVTLTHVSGFSSVGNQAVLSGNTLYVADGIPCTKQ

SEQ ID NO: 105657 - protein, 64 aa, Unknown
  Obtained from environmental sample
  misc_feature (1)..(64): Xaa is any amino acid
MVKKVRISGTGFAVPPKILTNAELSERMDTTDEWIRTRTGIEERHIASEDMQNSDLAAEAPAEA

SEQ ID NO: 105658 - protein, 195 aa, Unknown
  Obtained from environmental sample
  DOMAIN (11)...(69): Collagen triple helix repeat (20 copies)
  misc_feature (1)..(195): Xaa is any amino acid
VAGDGTLTWARSSSAAAPAAQNIKGSPGADGADGQDGADGKDGADGKNGADGADGKDGTDGKSAYETAVDGGFIGTEAEWLASLKGADGADGQDGADGNDGTDGVDGKDGKSAYEIAVDGGFAGTEAEWLASLKGADGADGKDGIDGQDGTNGKDGADGADGQNGAGVPTGGVAGQVLTKTRRRGFRYRMTTRRY

SEQ ID NO: 105659 - protein, 151 aa, Unknown
  Obtained from environmental sample
  misc_feature (1)..(151): Xaa is any amino acid
KYVFDTNIFINLKNRYPPDIFTSLWEQIEALFSSGIIISSDEVIDEIKRGNDDLEEWANARKDSFYPSSEPVQMIVKEILGQFSGLVTNPKKPNTADPFLIALARQTACTVVTEENRSGNDLSPKIPNICDYYNIRCIKFVEFLRENRITS

SEQ ID NO: 105660 - protein, 279 aa, Unknown
  Obtained from environmental sample
  DOMAIN (129)...(279): Peptidase M16 inactive domain
  misc_feature (1)..(279): Xaa is any amino acid
VKIGTKVAAYQLLSSLYQRGGTEKLSPAAVDDSLEFLSASISGGIGNTKSKIHVNCLSRDFDKVLPLLFDLFNKPRLDSARLELQKNSAIQKYTHRYDQPSAHASALSSKVLYKNNPKLWEADSAHLAKVKRANLLAIKDEVFVPRRVIIAAAGDFNTDSLKKTLTELFAKWKKEKQAHPQFPPLEFNEHTGIFASEKNISQANIIMAAPFVKRPHPDYYQTAIANYILGGSSFSSILTNKVRTQGGLAYSIYSFAQSDYEDIALVGITLQTKAESAKT

SEQ ID NO: 105661 - protein, 286 aa, Unknown
  Obtained from environmental sample
  misc_feature (1)..(286): Xaa is any amino acid
GRKYNIYAGDYNDVTIGNITSDVNVVINAGTGSSVEVSNIAAGGTVSISGAVINKNTSNIYEWTGTKDTVWNDNDNWHTKASPGNGGSAFNIIINSSTNNPVLDSDLECNSLTIETNMSLDTAAYDLTVDTLDNKGNLILAGDGTQKIAITSPITNETVTYDDASGTDFAGLTNFKNLTIKNGDRTGVGAIVVNGNFTLENGSLNAASINVTGTSSIAANITTAAGDQLYNEAVTLGGDVELVGQTVTLGSVIGAGFSLTITGEIVLHGGSGINDLTVTGNTTIDA

SEQ ID NO: 105662 - protein, 258 aa, Unknown
  Obtained from environmental sample
  DOMAIN (1)...(79): Semialdehyde dehydrogenase, NAD binding domain
  misc_feature (1)..(258): Xaa is any amino acid
DADCVFSCLPHAASAELLLPIIDRGIKVIDLSADFRLRDANVYKEWYCDDKHPAHAAPHLLERAVFGLCEHYRDQIAGASIIANPGCYVTSILLPLLPLYKGGVKIEWVIADSKSGVSGAGRGLKQNTHFPEANENFSAYSIGHKHRHTPEIEQELSAAAGRPITITFSPHLLPVNRGILSTIYLKTEISAAECGAIVKKFYSGSDFVRIRESSDLPQISYVVHTNYCDIAFTGGGGGQPVIAVSALDNLVKGASGQA

SEQ ID NO: 105663 - protein, 267 aa, Unknown
  Obtained from environmental sample
  DOMAIN (1)...(108): Response regulator receiver domain
  misc_feature (1)..(267): Xaa is any amino acid
DSKVILDYFRVVARKLGVYCDTAMTGEEAISLVERDNNYHLYFLDFQMPDMDGLQVSHAIKPLVSEDSEVIMMTANEWTTDAEEAKNAGVHKFLSKPLFPPVIEGVIDEYISAKNQENTNERNLEVVYEGRKILLVEDMEINREILLALLEPTLLEVDCAENGLQAVSMFAEAPEKYDMIFMDVQMPEMDGYEATQRIRALEVPSAKNVPIVAMTANVFREDIEKCLQAGMNDHIGKPLDFNVVLEKLRTYLPARAYCLSPARFHCD

SEQ ID NO: 105664 - protein, 229 aa, Unknown
  Obtained from environmental sample
  misc_feature (1)..(229): Xaa is any amino acid
LSGSSDSVNAVWYGLSQNGDYMPQGLYTITVSGVGVNTAYSFKVWLGRPFASVNLMEGNRLLVDDFADGDLIPYIGKEWTSFFDSDFGQAGASTAALSVKKDIDGKEWLSWAYKLNAGGLGFDPYAGLDWNCKTADGKAIDVTGVDTLIFKAKTAGGSVSVSVQLVSSDFNFPGEYQYFSDSIVFTASSKDFVLPLKKLQQRTDGNGKELSKTLSALTSIRFQVQEQTG

SEQ ID NO: 105665 - protein, 92 aa, Unknown
  Obtained from environmental sample
  DOMAIN (2)...(82): Ribosomal L27 protein
  misc_feature (1)..(92): Xaa is any amino acid
MAHKKGASSSRNGRDSNSQRLGVKAFGGQLVPAGSIIIRQKGTVVHPGTNVGKGSDDTLFAKVTGTVQFSRGARDRKRVSIVPAPAVAAAGS

SEQ ID NO: 105666 - protein, 171 aa, Unknown
  Obtained from environmental sample
  DOMAIN (3)...(77): Uncharacterized protein family UPF0004
  misc_feature (1)..(171): Xaa is any amino acid
AARESGWQEAANSEEADLVLLNTCSVRATAEQRVFGRLAQYMALKKKRPFTLVVAGCMAERLGEQLKKDYAVDYVMGTSARSLFPLILESVEKGSVFTETAEKPIFSFSYFHRDSSSPFRSFVPIMHGCNNFCSYCIVPYVRGRELSRDPKAILEEIRLLGSRGVKEIPFW

SEQ ID NO: 105667 - protein, 175 aa, Unknown
  Obtained from environmental sample
  misc_feature (1)..(175): Xaa is any amino acid
LYAPEDFTGAYVFVGLYAPGLFDVFNTPLSSVYPGMGVHITLLDNMLKGDFIRESRQWFNLLILFAVISLIVILCLYSSHVLLPLGGVVLAVAGVVAAAFAAYDRGNLWFPMIVNFAGIAVSFISATLYNYATEGSQKRFIKSAFSQYLSPKVIEQIIADPSQLKLGGEKREMTA

SEQ ID NO: 105668 - protein, 93 aa, Unknown
  Obtained from environmental sample
  misc_feature (1)..(93): Xaa is any amino acid
MPSSLHTLSLAEARRMLLRREVSAERITAACLERIRQTRELNALIGDFSEQALEQARALDKKGPEPGRALWGIPLTVKDVIPPRACAPPPPRA

SEQ ID NO: 105669 - protein, 63 aa, Unknown
  Obtained from environmental sample
  misc_feature (1)..(63): Xaa is any amino acid
DGYEPGKPQPSFDKQYLRNWLLTQNWNMTSPPPALPGEVVKETAAKYLEAYCKLTGQDPGINL

SEQ ID NO: 105670 - protein, 131 aa, Unknown
  Obtained from environmental sample
  misc_feature (1)..(131): Xaa is any amino acid
MAENLNYQTPNGSHCYNDCGNNCKKYGRLYSFDAAKIACPIGWRLPNKKDWDDLAATTGGETAGKKLKARSGWYWNNMLINSGAGSSIGEEYWYRTANGTDSYGFSALPGGCGNDDINQSVTKPVGGHLLK

SEQ ID NO: 105671 - protein, 85 aa, Unknown
  Obtained from environmental sample
  misc_feature (1)..(85): Xaa is any amino acid
MDVPLRYRLKLNSSFKIKNGSLSFDIPFYSDPYVDRDFMRRTEVLDWLAMLREGVSASAAVSDASINAYEWKLSGSFNPSISNLA

SEQ ID NO: 105672 - protein, 202 aa, Unknown
  Obtained from environmental sample
  misc_feature (1)..(202): Xaa is any amino acid
VRETAGPSGKGDDRFSGSRVYLGEEARALLLSVSPATIDRKLRKQKKACRLKGLHATKPGTLLKSQIPIRVCFARDEKRPGFFETDTVSHCGANASGQFCKTLSLTDVGSGWTEECALLNSAHRWVKKRIESTRDNLPFPMLGLDSDNGGEFINHQLLDWCVQNNIKFTRGRPYRKNDNCFVEQKNGDVVRKTVGYARLRVK

SEQ ID NO: 105673 - protein, 151 aa, Unknown
  Obtained from environmental sample
  misc_feature (1)..(151): Xaa is any amino acid
LTHYRRPLDFKETQIEEARDSYNRIYESVSQARSLLKNKQIDGDPVVYNDVKQIISDFSSAMDDDFNTPVAIAHVYAIVKLLNTETHNSASDLGKIKTILDFFSSHVEPILGFSFDEQSASSNDQTQELVKYLSDIRQKLRDAKQFELADK

SEQ ID NO: 105674 - protein, 126 aa, Unknown
  Obtained from environmental sample
  misc_feature (1)..(126): Xaa is any amino acid
FRPEDYLAPNAQLRCVLQVLASRFSLAVVTNNTVSVTVRTLSVLGIDDILQKIVGLDTVKVSKPDKSHFLKAAELCGTPIEQCISIGDRYDIDIALPLEMGMGGILVDSVEDVYKLPDLFADSNAI

SEQ ID NO: 105675 - protein, 168 aa, Unknown
  Obtained from environmental sample
  DOMAIN (68)...(163): Peptidase family M23
  misc_feature (1)..(168): Xaa is any amino acid
SDATAIQLANELFSDTALLGTVLFIPGARLDWTERQEINGDLFIWPTAGYITSPYGYRRWPFGGNVRQFHSGMDIGAPMGSPVRAAISGRVSAVGWDDVLGNYVVVSHHSGYRTLYGHMSTTRVKSGAYVGTGERIGDVGSTGMSTGPHLHFTVYKNGVTVNPRTLMK

SEQ ID NO: 105676 - protein, 109 aa, Unknown
  Obtained from environmental sample
  DOMAIN (16)...(109): HDOD domain
  misc_feature (1)..(109): Xaa is any amino acid
MQTITPDLIQRRVNWLPSLPASVVAVGEIASKEQSTVDDMYHVLEKDPALSASVLRLANSSLMLASGTLASDLRTAIQRLGMDAIINLSQGIAVIRNYRVGESLDVVLL

SEQ ID NO: 105677 - protein, 159 aa, Unknown
  Obtained from environmental sample
  misc_feature (1)..(159): Xaa is any amino acid
MDYISSWFDKMGFWQSVLASIVAVIIIEIIVRFMKKFSVLKWLFNIFLEIVCGIWSWIRIIFTINKLNAKVNVLEEKINKMGENKKLEILSAKNRIEKGEDFLDERDGRIYKTIVIGKKIWMAENLKGEDCDWHTAKKSCPSGWHLPSKEEWLELINFS

SEQ ID NO: 105678 - protein, 280 aa, Unknown
  Obtained from environmental sample
  misc_feature (1)..(280): Xaa is any amino acid
MDHDITALKQIFKSHTLQMASFTITEKGYSLTGRDGALMPEIAEDMRKGPANPQSYLGRIAALLHERFVNGELPLAMVSMDNCSHNGDKLFNAMEAFAIDWVKNKIVNESFLTFIRNKEKLSFPWSMIDKITPRPDESVRKMLSDLGLENMQDIVTGKNTFIAPFVNAEETQYLIIEDAFPNGKPPLEKTGVLFTARETVDMVEKMKVCTCLNPLHTALAVFGCLLGYTRISEEMKNPDLVKLIEGIGYREGLPVVTDPGIIKPREFIDQVVKVRLPNPF

SEQ ID NO: 105679 - protein, 241 aa, Unknown
  Obtained from environmental sample
  DOMAIN (2)...(241): FemAB family
  misc_feature (1)..(241): Xaa is any amino acid
GPKALLELAKKLKQFLSKDTAFIRFEPPWHYNDGDENLKNELIMLHSVGFQKAAATVQPPDTVIINLAPSHEEMLASMKPKWRYNVSLAEKKGVKVNMCGAQDIEIFYNLLKETSARDGIAVHGINYYRTLFEVCESQNKKDQFIRLYTAEHEGDIIAAIVVLFRGKDATYLYGASSNEKRNLMSPYVLQWKAMKDAKEAGCINYDLFGIPPNEDPNHPMAGLYRFKTGFGGQIIHRTGSW

SEQ ID NO: 105680 - protein, 220 aa, Unknown
  Obtained from environmental sample
  DOMAIN (97)...(207): Histidine kinase-, DNA gyrase B-, and HSP90-like ATPase
  misc_feature (1)..(220): Xaa is any amino acid
MMIISGYTVLLTKSKELNEKDRGMVENIAQTIAKLQEFSMSVLELSKSKVTLEHKEVELAQTLRSCIDAHFPKQSSRFAVSCAQHGAAPIEGIFTNGNQKKLERVFINIIRNSLEAGAQRVNVRFYAYNAIVLTVIEDDGDGCDADHLSNIFTTFFTTKHRSGGTGLGLCVIRSIIEAHGGDINIYSKNLLGGGKHGLTVQITLAASKRMPYETAKHEFL

SEQ ID NO: 105681 - protein, 199 aa, Unknown
  Obtained from environmental sample
  misc_feature (1)..(199): Xaa is any amino acid
MSKEQKAEVNTVFDGMKDNSNLDYVTCWYKKAAQYIQDTNIEVAFVSTNSICQGEQVPILWPELMNKHGIKINFAHQTFKWSNEARGKAAVYCVIIGFALADRDVKKIYQYATVTGEPMETLVKLINAYLVDAPLLFIQKRSKPLCNVSEMVFGSMPNDGGNFLLSAEETKQIIEKEPYLTEIIRPFLGADEFINNIPR

SEQ ID NO: 105682 - protein, 93 aa, Unknown
  Obtained from environmental sample
  DOMAIN (37)...(91): Helix-turn-helix
  misc_feature (1)..(93): Xaa is any amino acid
MGKKSSANFHDFYIDDENVSPAQRAKIEFEVELIGKLIEVREAKNLTQKQLAEAAGVKQSAIARLESLKSTPQIDTLFRVLTPMGYKLAIVES

SEQ ID NO: 105683 - protein, 160 aa, Unknown
  Obtained from environmental sample
  misc_feature (1)..(160): Xaa is any amino acid
MARPKRPRIVTAQGTTITLNSGPQAFEQLCAGSEAVLLMGLGPDPAGLEPLVKTHTRVFWCEHPDVLARLDAFSPGRRDGLPEHWQRVLPEELLSLPLHGDVFFYRQNAQLFPEFWGPLRARVLVRRLDLGQQARARSILLPGDDASLLIRELAAAFTAE

SEQ ID NO: 105684 - protein, 67 aa, Unknown
  Obtained from environmental sample
  misc_feature (1)..(67): Xaa is any amino acid
MKNYRDHYFLKAKQQRYPARSVYKLKEIDAKFKLFKPGMKVLDLGAAPGSWSLAAAERIGPSGRILA

SEQ ID NO: 105685 - protein, 111 aa, Unknown
  Obtained from environmental sample
  DOMAIN (6)...(111): Crossover junction endodeoxyribonuclease RuvC
  misc_feature (1)..(111): Xaa is any amino acid
MASITVIGIDPGSGCTGWGVVREESGVLRLVDCGAVRVKDADFSARLAAIYHALVTIVGRCAPQEAAVEEVFTARNAATALKLGQARGVALAACASHGLSVRGYPPALVKK

SEQ ID NO: 105686 - protein, 253 aa, Unknown
  Obtained from environmental sample
  misc_feature (1)..(253): Xaa is any amino acid
VVQERKNSTFPGLNLTDFPDEIEGLKNITGLYLSDNLLKSLPEWIGNLTSLKELHLWENNIKTLPESIGNLSKLKKLYLLRCLEFKSLPDSIGNLRSLETLCIRGGKIEALPESIGNITSLTSLEIQSTPLVNLPESIGNLFNLKSLGVYNITEDLLYWDYFNGDRPFDYDEIPKERSPFTGLPDSVSKLTSLLYLYLSNTEVTNLPDYLGNLPALKTIDIIRCNIKTIPPSLQHLADNGKLRIMRSIEDLGL

SEQ ID NO: 105687 - protein, 110 aa, Unknown
  Obtained from environmental sample
  misc_feature (1)..(110): Xaa is any amino acid
MRVISWNVNGIRSVEKKGFASWVKNESADMVCIQETKARPDQLSPELLEIQDKNGKPYHAYWACAKRPGYSGVGIYSKTEPLNIKNLGIEEFDDEGRVLQAEYKDFTLIS

SEQ ID NO: 105688 - protein, 156 aa, Unknown
  Obtained from environmental sample
  misc_feature (1)..(156): Xaa is any amino acid
EAQNRAGEANVYYNEAIRICLEEVSRNAANRDTYTVLTWTLQRQRKYADVVTWGDRGLRIYPDEYRIVETMGEAYFYLGNYERSLLYMQRYANALPQGERVSTAFFFIGEIHRLSRRYHHADIAYTTALRFEPNIALWWYRLATVREQIGDRRSAI

SEQ ID NO: 105689 - protein, 120 aa, Unknown
  Obtained from environmental sample
  misc_feature (1)..(120): Xaa is any amino acid
FGLHLGAAGLAVKITVVQFVMVNIYFWLVARMLSFNYLHNLLHQLASPAVLLGLALISRESTLMLPPALATGLARFFLSGVLYSLLTALCLLAVPQIAGCSRQDLYDIAGRMWRNMPWGR

SEQ ID NO: 105690 - protein, 276 aa, Unknown
  Obtained from environmental sample
  misc_feature (1)..(276): Xaa is any amino acid
DRKTAPLEGKLLILQAYAGNAGADGVSHSFVELYNNTDKEIDLNGITLQYAGGTSDSAIKEVDDEWAVIELEGKIPAKGSYLILGPKQSAAARYQIPDGYGDIQLSDTFLNSRAFKAAIIHGTKTLAVQNPFDIDGKGGKVEGYIDMVGAANDYPKTDMIHGFETNPAKCSASESVRRATLTDTNDNSADFITTRYSATGEDAFTDEEIKVRRPRNSKAGAWDPFAAPASYSKLKLNEASGVGDDPDKFYELINTGAEDISLFDCKIYYNANSSTG

SEQ ID NO: 105691 - protein, 162 aa, Unknown
  Obtained from environmental sample
  DOMAIN (15)...(158): RNA pseudouridylate synthase
  misc_feature (1)..(162): Xaa is any amino acid
MKNELNGRILYCDGDCIVVNKIPGEAVEGAGKGMVDLPKLLAEQMPGLGLPPAEDALALPAAVHRLDVPVSGCAAFARTGTALRFLNNAFRGGGVEKRYWAIVEQPKDSKACQWIEGLSSEFVEIVHWIQHDSRKNKSFAHNEDGRGRKKAVLRCRLAGKGR

SEQ ID NO: 105692 - protein, 261 aa, Unknown
  Obtained from environmental sample
  DOMAIN (3)...(259): Protein of unknown function (DUF1015)
  misc_feature (1)..(261): Xaa is any amino acid
MVDALYAKHPNNVVRITQNKRAAADTANKDRHVRAAEFLNKWIGDTVITRDTDDSIYIYRQQFSVPGEDGKPVDRERIGFCSALKLVGLDEGVVLPHEYTLSGPKQDRYELMETTLANTGQIFGLASDDDGKLYGQIRLIMSSSPLVGIFKDENDAVHSLYKCSDNALIGQTAELMKTRTILIADGHHRYETALRFYRDTKDEAFSHVMMTIVSMADPGLIIRPFHRLVRKTNQGRSVGNMLEELAKYFDVVPIGKASADG

SEQ ID NO: 105693 - protein, 284 aa, Unknown
  Obtained from environmental sample
  DOMAIN (1)...(257): N-6 DNA Methylase
  misc_feature (1)..(284): Xaa is any amino acid
IDVRLFGQEINPESYAICLADMLIKGQNAENIRFQDTMIKDCFPNQSMRLVIANPPFGTSWGGKDAPEGVEKAVKDEYEIKSHGRWRGGLPTTGDEQLLFVQHAASKMDERLGRAAIIQNGSPLFSGGTSSGESQIRRYLLEQDLLEAIIGLTTDLFYNTGIGIYIFILSKNKRPERRGKIQLINAVNYWKQLSKSLGKKRREISREDMKAITELYADFKESKDCKIFDINEFLYKEYSVYQPLQRNYAITKERIEKMTASGCLDTIYNIEKIEELEEKDPKTI

SEQ ID NO: 105694 - protein, 77 aa, Unknown
  Obtained from environmental sample
  misc_feature (1)..(77): Xaa is any amino acid
AVSLIGSGTTPASDSSEYYNGEYNWIQSGDLFSVNEITMTEKTITKLAIKTFQSLNFYSRDFIVLAMYGASIGNVAI

SEQ ID NO: 105695 - protein, 56 aa, Unknown
  Obtained from environmental sample
  misc_feature (1)..(56): Xaa is any amino acid
AVRIAPQVVNGADTEMLQDLIMAAFTDGMTKTKEAVSAEAAMMTGGLNIPGFPGAT

SEQ ID NO: 105696 - protein, 268 aa, Unknown
  Obtained from environmental sample
  DOMAIN (61)...(189): ATPase family associated with various cellular activities (AAA)
  misc_feature (1)..(268): Xaa is any amino acid
IGMNDIQVKVEEVNKLTPREIVAELDKYIVGQKKAKRAVAVALRNRMRRLKLDPELRDDVAPKNILMIGPTGVGKTEIARRLAKLAGSPFIKVEATKYTEVGYVGRDVESMVRDLMASGFQMVKQEMQESFVAEADKRTEEILLDLLLPGTGKKSKPKKSAPAPVVRPMGSFTFGPENGQGAGLIGTAIQVGIPSYMNQDGQEEKAGTEEAEKPEDPQPSDSSGDPVASRTREKFRAMLRDGQLEDRTVELMVNQNPQFPPFEMMGVS

SEQ ID NO: 105697 - protein, 281 aa, Unknown
  Obtained from environmental sample
  DOMAIN (93)...(121): 4Fe-4S binding domain
  misc_feature (1)..(281): Xaa is any amino acid
FSCILGPKMVDVVQHNDITLHACAEVEEISGYVGNFTVRIKKRATYVDWKLCTGCGMCMEKCPSKQTPDMFNELVGTTTAINIPFPQAIPKRAAINPEHCRQFVKGKCGICSKVCPRDAIRYDMQDEIITEEVGAIVVATGYDLMDWTVYEEYGAGRYPDVITALQYERILSASGPYGGHIKRPSDGKEPKVVVFIQCVGSRDRSVGRPHCSGFCCMYTAKQAVLTKDHIPDSKSYVFYMDIRAPGKLYEEFTRRAVEEYGKEYIRGRVSGIIPDGKGRYL

SEQ ID NO: 105698 - protein, 176 aa, Unknown
  Obtained from environmental sample
  misc_feature (1)..(176): Xaa is any amino acid
MSVLRYVSQDGLKGLAARLAARARLMVPAREGASVMFREYAGGDLCLARATVSPKAAVLPACETLFTFTYAKESTEQDAGRVAGKPALTLSAKQEAAPTVLFACRPCDAGGIAVLDRPYLNGPHRDPYYAARRKALLVISLTCDAPCATCFCDWVGKGPASRDGSDVLLTRIGDGF

SEQ ID NO: 105699 - protein, 81 aa, Unknown
  Obtained from environmental sample
  misc_feature (1)..(81): Xaa is any amino acid
VVDEAQNLTPHEVKTILTRAGNGTKVVLTGDPYQIDNPYVDGSTNGLTFLAEHFKGQELFGHIILNKGERSKLAELASTLL

SEQ ID NO: 105700 - protein, 272 aa, Unknown
  Obtained from environmental sample
  misc_feature (1)..(272): Xaa is any amino acid
ANSGTGTTGGTSAAGTGATTAGTTNTSTGGTTTGTNAGTSAGSSTAGASSGTGTTGSSASGASAGTGTTGSSSAGASTGTGTTGSSAAGASAGTTTATGSSATEGTNSVSQGQNAVSGTNADKQSAGTSPNADNSSSGGKNAKNNLSAEERAKNGNESSPAVSLPFILLVSILALLLLGIIIFFASRKLGSSPNRVMTEAASTGGKAPRDNTKRDNIKRENIRDNNTTTRDTTKRDNNATARDTTKRDTTKFVDHSKDLAKYASVPNRRSTP

SEQ ID NO: 105701 - protein, 143 aa, Unknown
  Obtained from environmental sample
  misc_feature (1)..(143): Xaa is any amino acid
MGHCLMRMRRALLTFRPAWARLVAMLAIASLAFAVLTAPLVKTAESALFRFGIKDEQELGRKFEVLIRSRMPLIEDPEIKLYVRDIVDRLAAVMPTQPFPFQAHVLLYHSMNAFAVPGGNVFVQTGLITELDHESELAGVLAH

SEQ ID NO: 105702 - protein, 268 aa, Unknown
  Obtained from environmental sample
  misc_feature (1)..(268): Xaa is any amino acid
ANTSCTVILTAFGFVSGGQGTFSWNIILPGGITTAAMKIEPLSNGGTEEQAKDLLGTESPNNRSGSLNLASGPYQITFTLTKANYQPVIWFETLHVYQNMASRFEHEFFDADFNINKYTVTYYYNDGITADGKQTSAYGAAAVDPGNPDRTGYTFGGWYTDNDTFANKWNFDTPIYDNLPLYAKWIQNLSGTPAINGENKIHGTLTLDTGSVTGGSITASWPGSNPVPYTLRLDASGLAVIDTVSFSATESVTEITAASGTVDIHYTL

SEQ ID NO: 105703 - protein, 279 aa, Unknown
  Obtained from environmental sample
  misc_feature (1)..(279): Xaa is any amino acid
ALEYVPDAHKTEAVCLAAVRQTHYALSFVPDAKKTEALCLIAVQEDGHELEYVPDAKKTEAVCLAAVRQTHYALEFVPDAKKTEEICLIAVEQYGIALEYIPDAKKTEAVCLAAVKERGSALGFVPDALKTGAVCLAAVQEDGRALEYIPDAKKTEAVCLAAVIQDESAQVYIPDDLKGKVKAALENAFSTEALCLAAVQQNGRALQYVPENFKTEAVCFAAVQQAHSSALEFVPENLKTADLCFEAVKHIGYYKQVDGALRFVPEELRGEVLHRLNTH

SEQ ID NO: 105704 - protein, 255 aa, Unknown
  Obtained from environmental sample
  DOMAIN (7)...(64): Bacterial regulatory proteins, luxR family
  misc_feature (1)..(255): Xaa is any amino acid
DTIFIYVENLSSREREIFDLLLEGVSPKEIANRLNISYSTVDYHRTKLYNKLDVHSIQELFAKYSTNGKAPPAETLEVETTALVSQINKKKLKVLLPVGIALISLSVLLFLIFARKQTADTTPKGEIIPVQNLGFFTTSDAEIGGSSTAEFFITQEKIDGTINSVLNLKTNVARNGDSTVVYAMAYTHKKDIIQRLRQANGIRFKALGDGKVWDVEFHTTESTPERKYACYTYMLGTAHDRVVVVDIPYSSLFLP

SEQ ID NO: 105705 - protein, 69 aa, Unknown
  Obtained from environmental sample
  misc_feature (1)..(69): Xaa is any amino acid
MRFGLDDGRIKTLGEIGAKLGLTNERVRQIEIKALRKLKQSSMVQELSSWREDFGTIDDGGLEARGEED

SEQ ID NO: 105706 - protein, 157 aa, Unknown
  Obtained from environmental sample
  DOMAIN (42)...(123): Shikimate dehydrogenase substrate binding domain
  misc_feature (1)..(157): Xaa is any amino acid
MPLGVFMFPKDFKDFEFKILNLILTGTGMNTSLSGATKIVCLLGDPVAHSISPQIHNRAFDALKLPYVYIPLRVEPRLLHSAIHTLRSGMAGANVTIPHKERALRFCDEISELSAAIGAVNTLYIRDGRLCGTTTDPIGFYRALGAAGHKLDGSDDA

SEQ ID NO: 105707 - protein, 193 aa, Unknown
  Obtained from environmental sample
  misc_feature (1)..(193): Xaa is any amino acid
MKNKIIFFTLLAGAALALYAQDFGFGSDEDAGKELSGSSITVKVGGEIAMEFSPYTHDFDKQTISFWDMVSGSLNFKATGENVEAYAAFNLNADAISELWEEDTRLGELNYTPLIIDEAFLRGYIGSVTIEAGLRKLTWGKADSFGPLDVINPLDYTDLRNMTDIQAVKIARPLFHVSWDMDGFSKLKGFLFL

SEQ ID NO: 105708 - protein, 237 aa, Unknown
  Obtained from environmental sample
  misc_feature (1)..(237): Xaa is any amino acid
KAKLIAAEKAHESALPASLQSPKIKTDKSAAVIGAGPAGIAAAVFLRRAGVPVTVYEKRDKAFGIVRYVIPSFRISDEAIDRDYLMAEKLGVEFKFNQPDNFSIDELRKKHGFVVIACGAWKEGSNVVKQGQEKIIDALRFLEDSKKTNCGLDLGKRVAVIGGGDVAMDCARAAKRNKSVESVTIVYRRTREFMPSQYEEQELALADGVQIKELLAPETWSDGVLGCEVMQLGDFDS

SEQ ID NO: 105709 - protein, 241 aa, Unknown
  Obtained from environmental sample
  DOMAIN (1)...(151): Peptidase family U32
  misc_feature (1)..(241): Xaa is any amino acid
CLEELKSIRADTNVEMEVFVHGALCVSASGLCLFSSFLGGKSANRGMCTQACRRLYNHSQESGYYFSPSDLQLLEQLPDLAAAGINALKIEGRMKSADYVGAVTSAYRLVLDAIAEGDEEEILRSIARGQEILRGDFARSKTKFYFFSTTQSPLPTPHSPIDWLNPEQDGGTGIALGVIRKIRGGGNSARLSENNILPRSYTELHGGKADSRTKTPCNSVSSVVNSCLIDTSGNRQGLVVS

SEQ ID NO: 105710 - protein, 222 aa, Unknown
  Obtained from environmental sample
  DOMAIN (1)...(181): Methyl-accepting chemotaxis protein (MCP) signaling domain
  misc_feature (1)..(222): Xaa is any amino acid
EKKRLSQTSEAAKQVEKESQTLAEMNKVISNVATQTNLLSMNAAIEAAHAGEAGRGFAVVAQEIRKLAETTSQQSKNSEDAIKSLQARIKEIAAAAGHVEESFDGMIDMIHQVEGITASLKNATEEQGIGSNQLLSSISAIKSITHDVETGAQAMKTSSSEAVAACRNLTELSRSVDGKVSKCGEGAKSLTANSEAVAMSVENTKLAVAQLERSINPFKIRN

SEQ ID NO: 105711 - protein, 161 aa, Unknown
  Obtained from environmental sample
  misc_feature (1)..(161): Xaa is any amino acid
MRRASIFTAKADVKAYTKIVAAFKARKKGAAAADIAAATGLPLNTVRELLPRAADEYAGRLEVTESGEILYSFPKGFSSRYRGFFPFCRTFFDKLVQSSMVTGAFLFKIWIVVMLLGYFVLFMAIAFASLFLSVAASSSSNRSRRGSTGNMHFSMGIFNLI

SEQ ID NO: 105712 - protein, 132 aa, Unknown
  Obtained from environmental sample
  misc_feature (1)..(132): Xaa is any amino acid
MKKGIAFLTLVVFTLFFITNQVFSQRGGRAQEVIEVRLASPLPRNSDWGRLLDRISGEWSRVTDNQVRLRVIHDGLEGGEGKMLSSLNSDNIQAAVFTSAVLSEICPPVMTLSIPFIIKNNAELDVVLKDVL

SEQ ID NO: 105713 - protein, 252 aa, Unknown
  Obtained from environmental sample
  misc_feature (1)..(252): Xaa is any amino acid
MGKYVGYVPDRIIAVVMPLGYFVIAVRFCLKLRGKERLFAFLAMVIGTAAALPAVAKIIWGFEPPEPFYSWVNFLYDITYLLRVPAIIFLILAAFLGMPLFSAMGGIALVILQAAGREPDAASIQIYSALTELDIIAIPLFTVTGFFLSESKAGERLVRTFKALFGWLPGGMIIATIIICAFFTSFTGASGVTILALGGILYTILSENKYTEKFSIGLLTSVGGIGLMFPPSLPIILVASTTNTILHFMNIS

SEQ ID NO: 105714 - protein, 138 aa, Unknown
  Obtained from environmental sample
  misc_feature (1)..(138): Xaa is any amino acid
SGNPGIIRRGDQEVLYYILSAFAAILVLIGAVMVVYAWRKRLLKQSLLRSGNKVTAEFESVDIDTSLTVNDEHPYIIKCKWTDRYGVQHTLKSENLWFDPAPIIEKKHIKTFPVYMDLRNSKRYYVSVEELEGGLGEG

SEQ ID NO: 105715 - protein, 276 aa, Unknown
  Obtained from environmental sample
  misc_feature (1)..(276): Xaa is any amino acid
WTDRPEFAIYAECFNTEQNQYKVTIRYHEKPAEGLQLSSSIPDVVVASWLKNSLTIENFKTIDNFLTLKNFYINDFYPKLLEIGKIDKNQYLLPVAFNIPAVIFSRDKGRELSNSFTVDFNEIKKLSKGYNVETRGAYTRMGFSPLWNDSFLMTVAVLSDVSFKEAHPLSWDSAALDNSINFIYSWTREINTNSQAEEDFTFKYFFEPPEKLIQSGRILFSYMESSDIFTLSTEVKNNLDFRWIAEQDKVPLMEDIVFLGIPNKSKSQKAARAFIL

SEQ ID NO: 105716 - protein, 60 aa, Unknown
  Obtained from environmental sample
  DOMAIN (4)...(60): Ribosomal L29 protein
  misc_feature (1)..(60): Xaa is any amino acid
MVKANEIRELSPEEIVKKVDSLEEEFFNLRFQAKMGQLTNPIQLRTIKRDIARAKTILNE

SEQ ID NO: 105717 - protein, 278 aa, Unknown
  Obtained from environmental sample
  DOMAIN (234)...(272): WD domain, G-beta repeat
  misc_feature (1)..(278): Xaa is any amino acid
GDNDGAVRVWNTETGAITATYYGHEKRVISVAWSPDGKLIASGSGDNTIRIWDAPGFAEKAREPLKHERTVSSVAFNPDSRFVVSGSVDKTIRIWDTANGREIHVLRGHKSTVSSAIVSPDGRRIVSASFDNTIMIWDAKTGAWIRTLPGHIDWVSSAAWSPDGTQIVSASYDKTVRVWDAETGVPVRIIGSGVYETVVNDAKFNPDGKRIVSVGGFITANDKRAIAVWDIATGTLLQQVNEHTNGVYSFAWDVEGKRIVTASFDQTAKIYSADTGRC

SEQ ID NO: 105718 - protein, 275 aa, Unknown
  Obtained from environmental sample
  misc_feature (1)..(275): Xaa is any amino acid
DEFIGWTGALNSTEHTVTVTMDSDKTLLAGFRKIGADLPQYNVYFNANGATGTPPGIVSSDSGGVISLPGQAGMVKDKYSFVGWNTEADGSGENYNIYGKYTVTRNVALFAQWTRNPYTLTVNVSPPNSGAVSGYDPNKTYVHGEQVTVTAAPTSGNVFKGWSGASSSKNNTITIIMDDDKTLTAGFGAPDAKQFTVYFNGNGTTGGNVPATISVDSGSNITLPGQQTMEKIGGYIFDGWTANSAGAGTNYAANASYTVTSDVTLYAKWIRIYTV

SEQ ID NO: 105719 - protein, 111 aa, Unknown
  Obtained from environmental sample
  DOMAIN (5)...(35): Flagella basal body rod protein
  misc_feature (1)..(111): Xaa is any amino acid
MMRAMWSAAAGMTAQAYNMDTISNNLANVNTSGFKRARAEFQDLLYQTVNLAGTSSSLNTQLPIGIQVGHGAKLQAVQHQYTTGSFKGTAGEWDLAIEGKGFFQVTMPEWN

SEQ ID NO: 105720 - protein, 208 aa, Unknown
  Obtained from environmental sample
  DOMAIN (37)...(208): Glycosyl hydrolases family 18
  misc_feature (1)..(208): Xaa is any amino acid
MKKKGFKFVLVFAFLIFSTFWFSACASMGGKSKAVEPKVSCYIRTWPIPQAARQGNSPYWNAGMIKGEYLTDLIISFALLEKNDVSTPYIPELKPLPDNPMFTNIWDEVAALKEKYPHLKITFSVGGYGADGFSDMANDPKLRAAFVANVCKWLEDYNLDGMDVDWEYPVGPEWGQEIKSRPADKQNYITLLQDLRNAMDQLGAKTGK

SEQ ID NO: 105721 - protein, 196 aa, Unknown
  Obtained from environmental sample
  misc_feature (1)..(196): Xaa is any amino acid
VLIRERFMVSEKKPSIYSDRGNIGSADELDEYGVWVKGEPQDLTSASAENQESTEDFSMPELDVGFEDLAGGEGVSVDLPDLPDLPDIDDDTNFDALALSDIDLPHNEDNVGGEDTVLAEENFDTGFEELSVPEVDAGGEDTVLAEESFDTGFEEISVPEDNVGGEDTVLAEESFDTGFEEISVPEDNVGGEDTVL

SEQ ID NO: 105722 - protein, 274 aa, Unknown
  Obtained from environmental sample
  misc_feature (1)..(274): Xaa is any amino acid
VIEEAPAALDELEALDVKALDDDLADLGVPENNETGDADEDLIDIDLDDLGINLDPNVLLNEDVPEEQGEMDALLSEGVPEEQGGALEELSISDGVEAVDADVDLADESLDKEIAEVDLNDEPGDAEGLKQLLVEDTVPMTLAPEDTTYLEEEVPAESPGDDLSFDISFEDNSTFDSTSLDFSEAVIDEPDLSIGIVENPVVEPALEEIEDADFDLSALEELPEAGSEEDISLSLDTDIDSLNTDLSKEDDSLVQTVPEGLEETIEEIPASLND

SEQ ID NO: 105723 - protein, 265 aa, Unknown
  Obtained from environmental sample
  DOMAIN (13)...(205): 7TM receptor with intracellular HD hydrolase
  misc_feature (1)..(265): Xaa is any amino acid
MALHTSMPKRDPRSIIGVVLVMLMLYLLFNILFGRIVIGKKINNSEHYLLASISGFYIIGSVLLFNFLPGQNSFPVSLLMPTALFIMLLAVFMGTRPAMIMALALPLGSYFAGAFDNYSYIFALISGIAASTVLHNAKDRMSLIKAGMVIAAANSTAVVVILLLKQAGLYDYPALIFGAVLNGIVSGMLTLGFLPPLEHALNAVTPFRLMELSDLNAPILKRLFTAAPGTYSHSLMVANLAEQACQDIGANAMLARVGAYYHDIG

SEQ ID NO: 105724 - protein, 104 aa, Unknown
  Obtained from environmental sample
  DOMAIN (1)...(103): Type III restriction enzyme, res subunit
  misc_feature (1)..(104): Xaa is any amino acid
MPPLTPEQQKALDTLNNMLQANGFRGALLHGVTGSGKTRVYLELVSKALNLGMKTLILVPEINLTPQTRKRFEDFLGCKICVLHSALGAREKRDTWRKRVKFRL

SEQ ID NO: 105725 - protein, 162 aa, Unknown
  Obtained from environmental sample
  misc_feature (1)..(162): Xaa is any amino acid
MPKSKKSKRFKNKKFQNYNLSKLSEHKNVGGKLQSGWNSISTNKESISWRDEGIPNYLWAIVLIGNMDRMECLKLFRDVLRTAKTLGIKNDDITTIGLAKISESIKMPLFSAALNNASAKHFLGALSWLNCIPDNEFWKNHCDTLPEEESVDILSRAIYKCL

SEQ ID NO: 105726 - protein, 247 aa, Unknown
  Obtained from environmental sample
  DOMAIN (182)...(205): 4Fe-4S binding domain
  misc_feature (1)..(247): Xaa is any amino acid
LTGGDGLEIKQKIIDFAYSNGFSKVGFADCQPFHSESERIAKWFSNGRAGPLGYLSPEKMLDPQFVFPGGKSAIVVFLPYARPDAVPGLANGGLKLSRYLWGPDYHRIIKTRLQRLLEYIQDLAPGANGRACVDTAPLLERGLAVRAGLGWQGKNTLLIAGKQGSWGFLGTLLLDVEIQPDEPFIGNRCGKCTNCIDACPTKALEPFRLDCRRCLTTWNIERHAPPPSEVSKAISESGWVAGCDICQ

SEQ ID NO: 105727 - protein, 184 aa, Unknown
  Obtained from environmental sample
  DOMAIN (1)...(161): CDP-alcohol phosphatidyltransferase
  misc_feature (1)..(184): Xaa is any amino acid
ITDFYDGYFARKLRQVTILGKLLDPLADKLLISGALLSLVELNLTPAWMAFIILAREIAITGLRGIASEEGITIAADRWGKWKLGTQITAISCLLFGPVLDRWIFLLTNLGIFNEWSVGQFFSGSLSGGPPTWGLFAGLGLILMWVAMLLTVWSAVSYFRFFWRRLGARLMNSEGRLTGADDGN

SEQ ID NO: 105728 - protein, 186 aa, Unknown
  Obtained from environmental sample
  misc_feature (1)..(186): Xaa is any amino acid
MKGLKSLNEIIKPVVFVAKTIKIGKLLRTLQDKQAHMAVVIDEHGGTLGIITIEDIVEELVGEIWDENEKVVEPVRKSNDGSFRVLGNVNFSDMLEFIGVKDNVSSNEASSDEISSDETSVDETSADYTHEDEAPKDSAPDTTVANWIMERLGRLPKVGEKLTWRHLTVIVTRVMRHRVTEVKVSF

SEQ ID NO: 105729 - protein, 287 aa, Unknown
  Obtained from environmental sample
  misc_feature (1)..(287): Xaa is any amino acid
LQHSYEYYASTVAVDATENTDYFENYAVLERELFPHFTVSDFKQVRSLVEQNKAATILPNDVFLWPELRKKIAMREFASFIKSIGINRNLQEVMSMPLGVNEATVAEMATAYNSILSGKKYKCNDGDWNEPCIIKEILDKNNRLIFKNGVDSSEILPSSVVLPMRAMLRAVIKYGTAASAYNKLSITYSGLKYPFPAMGKTGTTNENRTAVFCGGLPLDTLIAICSYVGFDGNDKLKGKSVSLAGASGALPQWSGFAAAVLAGSKVESVLGNSIDYINTISPGEVSL

SEQ ID NO: 105730 - protein, 58 aa, Unknown
  Obtained from environmental sample
  misc_feature (1)..(58): Xaa is any amino acid
MKAIASSYSGIDFMKAIPIPSYVYKMIPYIATLIVLAFSSRNSQAPRAEGIPYDKGSR

SEQ ID NO: 105731 - protein, 249 aa, Unknown
  Obtained from environmental sample
  DOMAIN (2)...(173): Thiamine pyrophosphate enzyme, N-terminal TPP binding domain
  misc_feature (1)..(249): Xaa is any amino acid
RLNGAQITIETLLAHGIDTVFGYPGGAVLTLYDELEKSAGKIRHILTAHEQGAVHAADGYARVSGKTGVVIATSGPGATNLVTGIANAYLDSVPLLAITGNVALSLLGKDSFQEVDIVGVTQPVVKHSFVVHSVDKLEFILNEAFRIANSGRRGPVLVDIPKSVQSDECEYTGIPPSSEKEQPLSFDIEQIAAAIKGCKRPFIYSGGGVVASGAENELQKLSEKLSAPIGFSMMGLTALPYDYPMNLGM

SEQ ID NO: 105732 - protein, 271 aa, Unknown
  Obtained from environmental sample
  misc_feature (1)..(271): Xaa is any amino acid
RIYDLIYDPAKKLTVLPWECASVKITGSEPAFPNVIVENNGGKFEKIAEGLEFASGAAVDSKGNLVFCDTIHKRIYRRLADEKRLELLCDVHWHPMCAVFDSGDNLAITADVTELRVNDPSQPRFGRRREPHPYYMWFSPRGPKVYTFDTKNPYDTMKAIEQTPKSDAKPEVVYHPAHAWSPRTFIRDTLKPFDGYYILPDGKTAIAGVKDIGRSVMLRPAVPGGEYIAVDDAVHRAYKFDVADDGSLINERVCFDNACFGVLPLADGTIL

SEQ ID NO: 105733 - protein, 160 aa, Unknown
  Obtained from environmental sample
  misc_feature (1)..(160): Xaa is any amino acid
MGWTGINIDANPESIRKFDELRPRDINIQMGISDKVEELDFYIENDAAQNSFSKELFERRGNKIREVIRMEVKPINEILDEYLPKDQHIDFITMDVEDFEWRIIKTIDFNKYSPDFFLIEDLEYKNKDFMEYRFSEIYNLLKLNGYIVVGKTKRTVLLKK

SEQ ID NO: 105734 - protein, 240 aa, Unknown
  Obtained from environmental sample
  misc_feature (1)..(240): Xaa is any amino acid
GPDPDAPYAAENPLYLSLITQDLVMMDSDELVTVQNDKKKHNDTLIEVMERRVEETPGDPEGAYLAILGRLEFNNDPDFVRGVCGMIAVSRNGLRESDLKGAFEKLKMKFNPADFSWLRQMLRVHFAQGDMRQWDFAHQSLRRAIKKHWSEEKLKRLNNGIIDYFRSIIAHDDFAAREIMHHLCVAGKSSIAAEIITEQCESQGTMSVCDRLIRGLADVYAEDNGLEFLRKVLNTQKTWV

SEQ ID NO: 105735 - protein, 261 aa, Unknown
  Obtained from environmental sample
  misc_feature (1)..(261): Xaa is any amino acid
TMPASAVAVTANFEAVAADKFAVTVSSIGVGASGGNSYVPGTTVEIYAGEDPFGHRFKNWTVTSGGVGLANANGRTTSFTMPANAVTVTANFDEVETYLVKVLSEGSDASRDSSYREGDEITINAGTAPAGQWFKGWTVTSGGVTLANADNATTTFTMPSNAVTVTANFGATYTVTVSAGTGATGGGDYTPGATVTISAGTAPAGFVFKSWMSSNSSVVFTDANSATTTFIMPSAVVTVKAKFGGSFTDSRDGQSYDIVTI

SEQ ID NO: 105736 - protein, 231 aa, Unknown
  Obtained from environmental sample
  DOMAIN (29)...(166): ThiF family
  misc_feature (1)..(231): Xaa is any amino acid
MNGKLKLIPDYPFSRLELLVGADCLKALSGASVALFGVGGVGSWCAEGLVRSGIGRLMIIDSDVVNPSNINRQLPATSITVGRPKVEVLGERLREINPNADIIALQKTYSWEVRDEFDLGGYDYVIDAIDSLSSKVELIINACKAGATLFSALGAACKVDATRTRVSSIWKSDRCKLGRFVRKRLRKRGFKGDFLCVWSDEGAFVRDNGINTDDDCINTDYDDDVVGGVDT

SEQ ID NO: 105737 - protein, 205 aa, Unknown
  Obtained from environmental sample
  misc_feature (1)..(205): Xaa is any amino acid
MAAYAGANLYLGKRIFQSVYALYPKSSAAIFAIAYAAIAVLAIAANFATVSTFPPAVKDALRWSGGLWMGFFLYALMLFLASDAVIIIGRLIKIIPSPVPQNIRLYAGLTVITLTAALIVYGITNANKIMIASYNVRVHNKTLSGGMKIVMAADLHLGAAGSEKRLPKIIDAINNQKPDLVCFAGDIFNDNYYAVSDPERGSELF

SEQ ID NO: 105738 - protein, 243 aa, Unknown
  Obtained from environmental sample
  DOMAIN (143)...(169): The GLUG motif
  misc_feature (1)..(243): Xaa is any amino acid
LFGRIGTGGVVKNLRVTNVNINGYYHVGGLAGLNRGSIINCYVTGRVSGTGGVSGGGEIGGLIGKNENAAITNCHTNVEVTGHVNMVGGLVGWNSASSKIEYSYAVGGVSGMGEDLGGLVGRNDGSTVTDCYSIGDVKGDSEKSNAIGGLVGINYNAKVKNSYAVGVVIGNSSLGGLIGLNLGVGDTIASSYYNSDTLEAGGAYGTPKNTEEMKIPNTYVGWDFDKIWSILYDVNQAYPHIAY

SEQ ID NO: 105739 - protein, 265 aa, Unknown
  Obtained from environmental sample
  DOMAIN (29)...(65): WD domain, G-beta repeat
  misc_feature (1)..(265): Xaa is any amino acid
MVFTIVINITWASGIRDAYAKDKPNSMADIAVFPQLGHSGTINSMAFSPDGKQIISAGDTIKLWDTENGREVRTFSGHTGDIKSICFSPDGKQILSGSDDYTIKLWDTETGKEIKTFSGHTGRVIAVCFSPDGKQILSGSRDETIKLWNIDTGQEVATFNGDKGWVSSICFSPDGKQIFSGFFSGVLILWDVISGEIIAEDYHSGTVTSVSYSPDGRYMVSGSADRTFILWESTNCNPIGFIEFTESVNSVSFSPDGKQILASDR

SEQ ID NO: 105740 - protein, 84 aa, Unknown
  Obtained from environmental sample
  DOMAIN (15)...(83): Iron dependent repressor, metal binding and dimerisation domain
  misc_feature (1)..(84): Xaa is any amino acid
VRVIDTDADGHITLTDAGRKTAESVYEKHTLIADWLIFLGVDRKTAVNDACRMEHVMSEQSFAALKKHIENWKHDVYRQKKGEA

SEQ ID NO: 105741 - protein, 249 aa, Unknown
  Obtained from environmental sample
  misc_feature (1)..(249): Xaa is any amino acid
LPQTSGFSLDADQLTAVSSGLRKGIIIAGPGTGKTAVLAVKIARVISEGAPPASVLALSFTVKAAAELRDRVLSLTRKPKEEKPEAENPVIVTFHSLCASILREQYAAAGLPPDFKILSSAERDGILAKICAMAGSKALSPKRLGEYIEKQKRYFLLPGEKSKDLGRILPASLVSFIPEDNSGDNDAAVANAVANAYAEYRKQLNFLGAVDYDGIIAGTVRLLAMKEDILKYYCQKFGFIFVDEYQDIN

SEQ ID NO: 105742 - protein, 289 aa, Unknown
  Obtained from environmental sample
  DOMAIN (92)...(223): Ferrous iron transport protein B
  misc_feature (1)..(289): Xaa is any amino acid
DVDAVKVSAVKGAGVKELMEKALSAAMAGRSGRSVAFDGQVFTENAGLNKLYSDTVDMYAAAGEASAAFHAVKMIEGDSIETENFTKIAAETGRLKKDMDTGIFAGDFEGVVADRRYIYIERELSGAARKKGAEAGAMSGAGGETASKSQKIDRVLTHKYFGIPLFLLIMLAVFHFTFSENFLFIGSILKASGAAGDIPVVGNFGEGAFNSPGVMLLSAVELLTNTIYNAVAGVMPAGTWYTGLVADGLLGGLFAVFSFIPQILMLFFFLAVLEDSGYMARVAFIMDRA

SEQ ID NO: 105743 - protein, 100 aa, Unknown
  Obtained from environmental sample
  misc_feature (1)..(100): Xaa is any amino acid
MSTQDLAEFDRKFLDEYKTVFGIDEAGRGPLAGPVACAIAAMPLGEKDIIDGVNDSKRLSEKKREALYDIITDRALFYSVHFVHNNEIDDINILNATKKG

SEQ ID NO: 105744 - protein, 241 aa, Unknown
  Obtained from environmental sample
  DOMAIN (4)...(232): Type II/IV secretion system protein
  misc_feature (1)..(241): Xaa is any amino acid
MHFSNHETKERELDNIRYNLQALVPFLNDPKLTDIFCSSEGRISVKCFGQPIRDTDVQFSMSERLQVLNQIAKYMEQNIDFFRYPVLEATIPVPEWKSARITGIFPPWVPGPSFTIRKPPEKIYLLEDYVSNGQLSEERYRIIVDYIKNKKNIIIAGSTGSGKTTLSNALIQKKCELFPNDRYFIVQDVSELQCNTKYAEMIIIRSEQAISAVSLSLRYTPNCIIFGEVRKGSVMAELLDA

SEQ ID NO: 105745 - protein, 245 aa, Unknown
  Obtained from environmental sample
  misc_feature (1)..(245): Xaa is any amino acid
MPRLSATVNGHPLSLAGETRPFSKTLLTEFTLRTEELELDKLREYLAPYTMLALKSGALSTALKLRIFREEDESVQFHLASRMTIRDLELAGPRGTVFKTAGAEADVEIRPAGQRIVINDLFLDSPAIAVRRAADGGIDWQNFFTAPTQEKNAAPPPALAVTRARIANGSLDWHDAAVLGSAPHSVRNIQATVANFDSEGEGTADFRLEFGEGPAKFTATGTASLKPLRIEASVDMDRMPIPPFP

SEQ ID NO: 105746 - protein, 234 aa, Unknown
  Obtained from environmental sample
  misc_feature (1)..(234): Xaa is any amino acid
MDKRLEQLDLPPYLRACLEKAKSITIPETREELYELSLGPGGSDDYTVGFEVPGKGVVNEAEVVRCKNGLSVNYFDDYLRRRDPDCMRIGDDLPSDKPRFKDNYGPFAPVKQETLDWLANQDLIVVPFKAGGLVYGSPSLAVVPANCGFFALALVDLQGFCTFEELGAYTPRSILYLAPPFRHSHFNGKQVVVHDRTDTLHEIFAYNLYPGPSAKKGVFSALLDIGQHEGWLTA

SEQ ID NO: 105747 - protein, 268 aa, Unknown
  Obtained from environmental sample
  DOMAIN (2)...(128): Protein of unknown function DUF115
  misc_feature (1)..(268): Xaa is any amino acid
KVSSLLPEIRKRCVIVAVDTSLRFLSRNGIEPDFALVIDPQFWNSRHLDRCLSGNTRLIIESAVYPVVLRLPFKRMYLCGSLFPLGKFIEERVDPKGALATGGSVATSAWDFSRQLGARQIWIAGLDLAFPGNKTHYRGAQFEEKTLAESWRLWPLESWLTKAMRDGISCNGSALGGGTVVSDRRLSLYAAWFENCFSQYPEIKNFSLSEGGLAIAGLEVADRDAFLALPDRRKEIDARLETAGARIETEFFDPHETQRRSQRYDKAV

SEQ ID NO: 105748 - protein, 274 aa, Unknown
  Obtained from environmental sample
  DOMAIN (185)...(262): Bacterial Ig-like domain (group 2)
  misc_feature (1)..(274): Xaa is any amino acid
DGNLTRALAAEVLPSNATNKSVVWASSNPAVATVAPYSDPATGMPMATVTAVTAGPATITATSVNGSRVGSCEVTVGTKEPELTALALPSAIQLAVGGSHNLANSLEPAPSLAPTPSEATVHNLQWETSDPNFDFVALTQNNMLRGIKATPAGAPVTIQARTRTSSSNPTPVYSNLCSVTVVPASPVAVTVSPKTASVAAGGTQQFSAAVTGSTNTSVSWSVTAGGGTISAAGLYTAPATAGTYTVTAKSQADTTKSDTATVTVTATPMVKITR

SEQ ID NO: 105749 - protein, 211 aa, Unknown
  Obtained from environmental sample
  misc_feature (1)..(211): Xaa is any amino acid
MREKKISFKIKILIPILAIFIVSVLIISVINYRLLDSSVETKTNANMEIFADSILAQIRHLNIILDATKQTLNEKHIAIAKTVVDILDNTPGQMSTEKLLRIAQPLDIIELSVADSNGIIIASSVPKYIGFDYKLRETTRVYMKLTNGILTELSEEPRASVFENDVGDINHYTGVARKNGGFIQIGFNAGVIGRLQEEINIYKTIEETKIG

SEQ ID NO: 105750 - protein, 179 aa, Unknown
  Obtained from environmental sample
  misc_feature (1)..(179): Xaa is any amino acid
MPFISLASDPGLLSSGWYKKAFDFTGLGGIEPFIIAFGTAIIIFYFFRSVYSSLLTYFINRYSFGIYKYLSKNVFKTILSISYKVYVQKNSAEQIRTITEETNDVGKIVLNVMKLLSELFPVIFIYIVITVLNWKITLVITFVLLLLLIFILPFLTKINKKLGGKRLVSGKMIYRLLKE

SEQ ID NO: 105751 - protein, 271 aa, Unknown
  Obtained from environmental sample
  misc_feature (1)..(271): Xaa is any amino acid
VEQALIINEDFSVYERAIEFTGKIKVDLSGKNEAAAVKLLDDGIYRFPSTVKTGTQIRLNIDNSGLPKGSTMNTYAFYTNSQNAKAVKIANNEWIRSDGSVKPENIVILYSRSPIDIDSLLTTFDRQKDDIPSRLSRIIGKDFILFGNSKYEYSSMQIKANFMNQKSVAGMILSVSFDTEEKPIKDIVRIKGGTFTMGSPASEEWHQDDEQQRVVSVKDFYLGVVEVTVADFNAFVTDTGYKTTAEKNGKSYFFNYLTDEIEERNGMNWRN

SEQ ID NO: 105752 - protein, 174 aa, Unknown
  Obtained from environmental sample
  misc_feature (1)..(174): Xaa is any amino acid
MIQINEHSYRVLSDEEELLVTKTEEWLKERRPQDYFLAHERFRRLRNLGNAVFDYPSIRETQFVKDILINENQLTESFLAFSTPSHVLRTPAKVATLRSFLIAKFHAFYLLSRLTEKNNELHLQLRNIPFTVVFTLMAEDVYFSCLDDPTFSPNTKTMLANDLINLWESGSGSA

SEQ ID NO: 105753 - protein, 143 aa, Unknown
  Obtained from environmental sample
  DOMAIN (1)...(143): NAD binding domain of 6-phosphogluconate dehydrogenase
  misc_feature (1)..(143): Xaa is any amino acid
MNIGFIGLGIMGRPMAKNLIKAGYKLTVYDKFAKLDDVVALGAGGAASNKEVAEKSDLVITMLPNSPHVKEAILGAGGVIEGCRQGQIVVDMSSIAPAASQEVAAALAPKGVAFLDAPVFGGEPKAVEGNLAVMVGGDQKTFD

SEQ ID NO: 105754 - protein, 234 aa, Unknown
  Obtained from environmental sample
  DOMAIN (1)...(99): ROK family
  misc_feature (1)..(234): Xaa is any amino acid
MQIYAPVTERFGLKVSAANDVTSVALAELKFGAGRGVQNIVCFALGTGVGGGIVTNGRLYTGSHGMAGEIGHIVVETGGEQCTCGQRGCVERYASATGIVNMAVEMAMAETDESKWTAFAKLVRKNPGEITSKLVYEHVAKADALALRVHNRACDMLGRAVGIMINTFSPDRVVLGGGVMMAGSVVTEAVKSYAARHCWPAIFERCEIVPARMGEDAGVMGAGALAIEEFASTQ

SEQ ID NO: 105755 - protein, 181 aa, Unknown
  Obtained from environmental sample
  misc_feature (1)..(181): Xaa is any amino acid
MEESDTVYGGNQKLAASIREVYARLKPNVIFITTTCASGIIGDDVGGIAGEAEAELNIPVVPVFCEGFRSKIWTSGFDAGYHAIARKLIKKSGKKQKDLVNVINFWGSDTFTPWFKRFGLRPNYLTPYSTTKSIAEASEAVATVQICPTLGSYLGAALEQDFGVPEIRVAPPYGTLHTEKW

SEQ ID NO: 105756 - protein, 49 aa, Unknown
  Obtained from environmental sample
  misc_feature (1)..(49): Xaa is any amino acid
MVLGHVINIALAALGAFVHPLRLTFVEFYKHLEFQGGAKEYKPFAKAEA

SEQ ID NO: 105757 - protein, 88 aa, Unknown
  Obtained from environmental sample
  misc_feature (1)..(88): Xaa is any amino acid
LPMPMKLKLIYPRWSKLPGQTTFNLPPHGPVVFAAALPDYVDVTFTDENVQEINFDEDCDLVAISMMLSTQVKRGWAIADEYRNRANR

SEQ ID NO: 105758 - protein, 237 aa, Unknown
  Obtained from environmental sample
  misc_feature (1)..(237): Xaa is any amino acid
VSWSVEIKDENGDVARVIENKEQRFERLNMKEFFKRLFTSKKQIDIPPAIIWDGMRGTGEAPVDGKYTFIITATDNLGNTAVTPVYETVIRNRLPVITINPIPDAQKIFDPKGSSGGAQGGNRTVTITPKGSEEDAWESVIYNPTGQKIKTFETQSGEPKPIVWDGRTDSGQIAPDGVYIFRIGTTDKAQNSASAELTNIILDSREAGAFLTTSVSAIAPSKNQTSNMVNFTNRLLI

SEQ ID NO: 105759 - protein, 69 aa, Unknown
  Obtained from environmental sample
  DOMAIN (3)...(67): ThiS family
  misc_feature (1)..(69): Xaa is any amino acid
MKLTVTGNAKEYAEGLTVAKLIELEKVETPLYVTVSINDEFIASGTFEETVLREGDIVEFLYFMGGGQR

SEQ ID NO: 105760 - protein, 251 aa, Unknown
  Obtained from environmental sample
  misc_feature (1)..(251): Xaa is any amino acid
MRTFHIGGVATKASEADHITLKYPVYIREVIGTHITLDNGHLLFTRRGHAIVNKVMKEFKIERGDKLVAGDGKKINRGDVIIHRGGQDITSPEIAYAMILKNNDEEMLYLIGPEQKIEIRNGSDFQVKIGTVVDAEKKIATFDPFSDPIIAEKGGTVKFEDIILGTTLKEEIDEDTGNIEKRITEFQHESKQPRIVIKDDSDNEVASYFMPGGAYLLVDEGEKIRAGRTIAKTLKESRRAMDITSGLPRVS

SEQ ID NO: 105761 - protein, 86 aa, Unknown
  Obtained from environmental sample
  misc_feature (1)..(86): Xaa is any amino acid
LDTEKQKPALELTQTNPLHFPIQGERDYRDVQIRRVLDYASTYNNNGNNVDPEQEFMSAVENQMTLEMLYQAASFEFSQVNQVLRQ

SEQ ID NO: 105762 - protein, 150 aa, Unknown
  Obtained from environmental sample
  DOMAIN (7)...(150): Protein of unknown function, DUF258
  misc_feature (1)..(150): Xaa is any amino acid
MADNTLIGTVVEEQKNYYMVSVSQSGQHLRCTVKGTLLNKKKFRISAGDSVRVQVINQDRAEGVICEVAERTSFLPRPPLANLSQVVFINCFKHPNLDTEAIDRFLFSSTAYGINAVIVFNKMDLLGDAETAELAAAERYYKDVGYKSCT

SEQ ID NO: 105763 - protein, 173 aa, Unknown
  Obtained from environmental sample
  misc_feature (1)..(173): Xaa is any amino acid
MAKNWGCYVSGSKCYNNDPANCDKYGRLYNWATAMALDASCNDRSCASQIKSPHRGICPEGWHIPSDAEWTTLTNYVGGASTAGTKLKSREGWNSYSGAPLGTDVHGFSALPGGNGYSDGSFHDVGDAGYWWSASEYYSYLAYGRGMSYNGEGVYNNISFTKDNLYSVRCLQD

SEQ ID NO: 105764 - protein, 250 aa, Unknown
  Obtained from environmental sample
  misc_feature (1)..(250): Xaa is any amino acid
VENFITRFARYYTPAVVLAAVALAVLPTLFLSGAEFSHWMKRSLVFLVVSCPCALVISIPLSFFGGIGGASRQGILIKGGGFLSALNDVETVVFDKTGTLTRGEFSVSEVLCENGITRGELLYYAAAAESNSSHPIAKSILNAYEGEIASSDITEYEEIPGKGTSARIRGRAVLAGNARFLEDKGVTLHAISAAGTAVYIALDGLYSGCLVIADEVKPDAKQAMEELRRAGARRLVMLSGDTRAAAEKIG

SEQ ID NO: 105765 - protein, 287 aa, Unknown
  Obtained from environmental sample
  misc_feature (1)..(287): Xaa is any amino acid
MTKDFYDQAFSLNLRVLEYIPREFITAEMCEKAALGNGLAYIPAEYRSEKIITEAIKKKGFSLCHIDDRQKTYDLCFIAVTNDGSALQYVPYKMRTEAICFAAVKQDSEALRYVPESLKTRELCLMAVKKGYSGWIMRYVPEHIRTADFYTEFLKDDDWCIECVTEDDWFSSINFMDFPEPMPKELLRKAVRNDARALASIPEEQRSFELCVEALLNKRTIGSLLKHVPDKFKTPEFCLNCVRIYGGYLEGVPESMKSYELCFEAVTNSPYALEYVPPHLLNREIIL

SEQ ID NO: 105766 - protein, 263 aa, Unknown
  Obtained from environmental sample
  DOMAIN (3)...(80): Bacterial Ig-like domain (group 2)
  misc_feature (1)..(263): Xaa is any amino acid
FIEQRTTSISAAVTGVNTGGTETLVATIAPANATNKNVTWSSSDINIATVSGGTVTGVAAGTATITATTQDGGKTDTCVVTVAEIPVTGVTLNKTSASIVVGGSETLTATIAPANATDKGVTWTSSNNGIASVTNGVVTGVGAGTATIIVLTKNGGKTATCTVTVPVPVTGVTMNEPTATINVGATKALTATVAPTNAANKAVTWTSSNDAVATVSNGTVKGVAKGTANIIATTADGGKEATCAVNVKVPVASVSLNKTKTSI

SEQ ID NO: 105767 - protein, 167 aa, Unknown
  Obtained from environmental sample
  misc_feature (1)..(167): Xaa is any amino acid
MEPTKTAKISSILDAIRASIRQAEQTVTAIRAKQEQLAKVVALFDVKREEALKVLELKEAKKNEQLKREKELKALIAEEKATPLMNEKPASEKKVDAVPATEKKAEPTTEKKAEPVADKKPIAVTAPTHTNAPKVAEKPAHHSTTPASATATPAVKQPFTHPALIAA

SEQ ID NO: 105768 - protein, 119 aa, Unknown
  Obtained from environmental sample
  DOMAIN (15)...(119): Pyruvate flavodoxin/ferredoxin oxidoreductase, thiamine diP-binding domain
  misc_feature (1)..(119): Xaa is any amino acid
MNEPLLMKGNEAIGEGMILAGCRHYFGYPITPQSEIPEYLSKRLPETGGVFLQAESEIAAINMVYGAAASGARAMTSSSSPGISLKQEGISSMAAAELPCVIVNVGRSGPGVGTIQGAQ

SEQ ID NO: 105769 - protein, 99 aa, Unknown
  Obtained from environmental sample
  misc_feature (1)..(99): Xaa is any amino acid
MNGDPPSSRAPGPMLLQDGVDLKLVIQHSSDSIFVSDAQGRILLINPASQELLGLNIADPEEISVQDMLAKGVYEPSTALEAAECKTTVTGIVRSKSHE

SEQ ID NO: 105770 - protein, 208 aa, Unknown
  Obtained from environmental sample
  DOMAIN (3)...(206): Aldo/keto reductase family
  misc_feature (1)..(208): Xaa is any amino acid
KPWNNFIDTAAGYADSEEKIGEAIQGIKREDLVIASKSPARDKKTFTENLDLSLKRLGLDYIDIYQLHNVSSEAQKETVFDPDGAMEGLEEAVKAGKVRFPAFSSHSIPLAIEIMKSKKFASVQLPFNYIDREAAEEAIPLAKELDMGFIAMKPMGGGLLPDAALSFRFFRQYENIVPDPGFEKIEEVREIAGIVERRETLSEEDKKE

SEQ ID NO: 105771 - protein, 126 aa, Unknown
  Obtained from environmental sample
  DOMAIN (4)...(126): Bordetella pertussis Bvg accessory factor family
  misc_feature (1)..(126): Xaa is any amino acid
MSLLLAIDVGNTNIVIGAFGLDNLQYGQKSVLQRSWRIATTRERTADEYGLMVQELLRHQGMELSMVKEIVIGSVVPPLHPVFEACCNRYFNTAPLWIEPGIHTGLKLAIDNPSEIGADRIANSVG

SEQ ID NO: 105772 - protein, 203 aa, Unknown
  Obtained from environmental sample
  misc_feature (1)..(203): Xaa is any amino acid
MTKKNAAFLLALAPALAAVFSFILPYAASFAPAVLKFPSVLKTFLNNTTLLNITLFTFKQAFFSVLVSLALGLPGAWFIGNSRSRFTPFLKTLTAIPFAMPSILVVLGFVLFFGNSGWINRLFTVRILYKPQAVILAHGFFNFPLVIRLAGDGIARAKRAYAPAAASLGASPLKTILTVILPLTFPSILAASFLAFMYCFTSF

SEQ ID NO: 105773 - protein, 206 aa, Unknown
  Obtained from environmental sample
  misc_feature (1)..(206): Xaa is any amino acid
DPASSGFALCIVNTKGSHSDLTPDYAAVPAEMKAVASFFGKRMLRELNEETLLTRLVDLRNTIGDRAILRAMHFFSENHRVDAMLAALEEMAALPAEKAMDVFLALVRESGDSSWELLQNIYSPKNFNEQGLSLALALTKNFFNSGSGKGACRVHGGGFAGTIQAYISTERLRDYRNMMEGIFGIGALTVLRIRPLGAVELNLNQA

SEQ ID NO: 105774 - protein, 54 aa, Unknown
  Obtained from environmental sample
  DOMAIN (3)...(54): S23 ribosomal protein
  misc_feature (1)..(54): Xaa is any amino acid
MIKSFKELTVWQEAMNLVEMVYQQTMTLPKMEMYGITSQIRRAAVSIPANIAEG

SEQ ID NO: 105775 - protein, 274 aa, Unknown
  Obtained from environmental sample
  misc_feature (1)..(274): Xaa is any amino acid
GRACTIQFGSGGTNYVTIGELGASFNNTGGTWGVVTLTGGISGNSKKAETGTIEVADNVSVTSNASISNNSDRFSQAHGVYFNSTGTLNINGNVSTTSGSYGRAVYNASSGSVNILDGRIEDIHNASGTMTISGGTIYYPVSNAGTMTISGGTILYSLSNSGTMTISGGSITSPSTTGTLTLSGAGPTISGTLKVNGAGRIVAANNFAPGSKTYKMEFASYVHNNVAVAGGSALLSNFSLEGTTAWELAVKGSDLNIIDVKTPYVISGSGTSFN

SEQ ID NO: 105776 - protein, 204 aa, Unknown
  Obtained from environmental sample
  misc_feature (1)..(204): Xaa is any amino acid
MKTDFQFFKLYSLPVVLFLCLYPLKAGAEDFFYKHQKGDRYRIVSTVSEEVYVDDMLSHKAEILNRITGEVVDESEGKGKHKAIFQTSERAGTVTNRSYQWAREYESEFERDRLGRLTIDKKYFMPVVRDVPVFPGRDIKVGESWTYEGHEVHDFRDNFGIQEPYRIPFTAHYVYLGERAWKGKNYPAFSVNYRIQSQPKAVPG

SEQ ID NO: 105777 - protein, 166 aa, Unknown
  Obtained from environmental sample
  DOMAIN (1)...(162): N-(5'phosphoribosyl)anthranilate (PRA) isomerase
  misc_feature (1)..(166): Xaa is any amino acid
NPIKAAEIVKKLPPFVSKVGVFVNEDPRLALDTAHTAGVDVVQLHGDETPEYCAGFPMPVIKVFSVGADFDPSVMSRYATAGYLLDTWDPKRRGGSGNTFDWSIAAKACGMHDTVILSGGLNPSNVREAVEAVRPYAVDLNSGVEAGPGVKDHDKIKAAVSAVKGE

SEQ ID NO: 105778 - protein, 282 aa, Unknown
  Obtained from environmental sample
  DOMAIN (157)...(244): Elongation factor G C-terminus
  misc_feature (1)..(282): Xaa is any amino acid
CNYFNDRRLPVKITNIYQFEGLTRISVPEAGVGDIVCVAGVQGVTIGDTICDPNTPEPLPFVKITEPSVEMTFSVNDSPFAGKEGKFVTSRHLRDRLFKETIKDVSIRVAEADTSEAFRVSGRGEMHLSVLIENMRREGFEFQVSMPRVLYKEVDGRKQEPIDQLIIDVPEDCVGSIIEDMGKRKGELIGMNPFGSRIRMEFKIPTRGLFGYKTEFLTNTKGEGVLNSIFLGYEDYKGEIFRRANGSLIAHETGEAVTYGLYGAQERGSLLIGAGVPVYEGM

SEQ ID NO: 105779 - protein, 280 aa, Unknown
  Obtained from environmental sample
  misc_feature (1)..(280): Xaa is any amino acid
LSLPAYEASFTPLRTDKKTEGKLTLCILDKQDTGEFTDDKPNILSPVENEARYTAERINTLLREKSADGKPKYQPHDIAILFRSRKPQYLFEKHLMLLNIPYASEDLNGFFYGGPVNDLMSVLRLAVYPRDRAAYAQMLRSPFAGLSFSALGICLADMDNTSVPFGNEPLPLLGEEDRRKYSHGQRVYQKILYSACTETISALVSELWYNEGYRYETEWNPKTAAYREMYDYLFHLAAKADEENKTLAAFVDNIHELGKAGERLSDIEIPLERPASRASA

SEQ ID NO: 105780 - protein, 77 aa, Unknown
  Obtained from environmental sample
  misc_feature (1)..(77): Xaa is any amino acid
MTCFMCKGTVQDGLSVFTADLGGCIVVIKNVPSGVCGQCGEASYSDDVTRRLEQIIQSVTQSAAAEIAVVCYSEKAA

SEQ ID NO: 105781 - protein, 269 aa, Unknown
  Obtained from environmental sample
  misc_feature (1)..(269): Xaa is any amino acid
MRSEGASVRAQKAWAKFDAMQDTANQARAAGSNPDAKQVSASQSPGGQPAEPKLTSGDGVPAAGKPAPDSAAPGSPGNRDTAVNQGAGSGNEVESDQGGYYNGDGQWQDIWGQEVPFPSDSPGHEPSTSPASSLNQPGGATSGQHQDSPPSQWPSVEGNADVNNSSAAPVSSAGSSTSGTRTSAGAANSAAPTTGASQVPADGSGQVKGVTAGNAAPTAPATATTNGSGNSQTGGGGQVPTTAGKTTVPSAARGADTTAPNSVDAASNG

SEQ ID NO: 105782 - protein, 247 aa, Unknown
  Obtained from environmental sample
  misc_feature (1)..(247): Xaa is any amino acid
LDPDSETPRFIQRLSWTGGTYALHCEIIIEKEEGAGYVNYLDKFTNGNFFDISLPPGNYRFRVIPYDILGKPSEASRWAEFKVYNAVKPEIYKPEEELEYYNDNHGSKFEINGRNIEPDAQVYFVNSKGEHIVPSEVIRSGDGSSLLVSFDKNQLVDGEYEVFIVNPGGLETSMGGIDYKTYREKFGLMHYYTSASFMPSIQSYGEGLSSEGFLYNLSARIGIISCIFSNNYIGMEFTVSWYSLFLD

SEQ ID NO: 105783 - protein, 164 aa, Unknown
  Obtained from environmental sample
  DOMAIN (40)...(158): Response regulator receiver domain
  misc_feature (1)..(164): Xaa is any amino acid
TGQGSKFIFTIKAGKGSDKAREEASVQTGSDESRFDFSKFTILVSEDDAINREVMAALLEKIGISFDFAENGKKAVALFQEHPEKYNMILMDVHMPEMNGYEATRAIRESVSPIGKNIRIIALTADVFKEDIEKCLEAGMDGHIGKPVYPNNLYAMLKKHLLTS

SEQ ID NO: 105784 - protein, 92 aa, Unknown
  Obtained from environmental sample
  DOMAIN (6)...(90): Response regulator receiver domain
  misc_feature (1)..(92): Xaa is any amino acid
MGNERKKIIAVDDNVENLTALKNTLKNNYETYPCPSAQKMFTILEHIQPDLILLDVEMPEMNGYEAAEKLKSSDKYKTIPFIFLTSLEDEES

SEQ ID NO: 105785 - protein, 190 aa, Unknown
  Obtained from environmental sample
  DOMAIN (7)...(190): impB/mucB/samB family
  misc_feature (1)..(190): Xaa is any amino acid
MPCFIHADIDAFYASVEQLDNPELRGKPVIVGGLPDDRRSVVSAASYEARIFGVHSAMPITQAHKLCPQGIFLRGRMSRYREKSDEIMKIFSDFSPVVEQLSIDEAFLDITGTDKLFGPPDVAARKLKERIRLETGLTVSTGIASNKYVAKIASGMSKPDGLYRIKNGGRGKIHALPSGNKDMGCRRKNP

SEQ ID NO: 105786 - protein, 67 aa, Unknown
  Obtained from environmental sample
  misc_feature (1)..(67): Xaa is any amino acid
IPHAKSKISPYVSISIGVFIERCGVPTDTKTMYDMADKALYNAKEGGRNCAIISGSTIEQYKIKPQQ

SEQ ID NO: 105787 - protein, 278 aa, Unknown
  Obtained from environmental sample
  misc_feature (1)..(278): Xaa is any amino acid
MDNPSMLKIQTIHSFCEDVLRRFPIEANVPPAWRLVSGAEQKRILKSAFAELMNQAPSAEVLGAFDNIIGGISEYSLDELLESLREQIPRIFLLKQKPNFPGYVIEKTKKFLGLDSPPKKPDSGIDFDSLLTKTGEIRKKLPQNMLEAADAAYKFTQYEKGMENMRSSADFLTLAIAFADKYGALKARMGLLDFDDILHKTMTMFKNPETMGQVLEQLDGRIRHILVDESQDNSAVMWNIIFCMLDDFFPDGEGANPRSLFIVGDIKQSIFSFQGASP

SEQ ID NO: 105788 - protein, 168 aa, Unknown
  Obtained from environmental sample
  DOMAIN (2)...(167): Methyl-accepting chemotaxis protein (MCP) signaling domain
  misc_feature (1)..(168): Xaa is any amino acid
SESVNELTSSSGLGRISLQDAAADIEEIARDSEGLLQINRVMKEIASQTNLLSMNAAIEAAHAGEAGRGFAVVAEEIRKLAESASEQSKTISAVLKKIKASIDKVSESTGNTITRFEAIDSDVRTVSTQEENIRGAMEEQNEGSKHILEAVGKLNAITRQVKEESGEM

SEQ ID NO: 105789 - protein, 183 aa, Unknown
  Obtained from environmental sample
  misc_feature (1)..(183): Xaa is any amino acid
MATNTARILPVGIQDFPKIRERGFVYVDKTARVYELLTGSGEAFFLSRPRRFGKSLLCSTLGAVFEGRRELFGEIAGRPALAIDTLDWEWKAHPVIRFDLSTGNYGEGTPVLNAVLQNTLDNAARRYGAALRGQTVPLQFANLIADLRERLNEKVVVIFDEYDSPLTNTLNKRDVHVELRDAL

SEQ ID NO: 105790 - protein, 272 aa, Unknown
  Obtained from environmental sample
  DOMAIN (127)...(270): Glycosyl hydrolase family 3 C terminal domain
  misc_feature (1)..(272): Xaa is any amino acid
MHQSKELLTDLLKDEMGFEGFVISDWAAVTQLSGGNYKVQIANAINAGVDMVMATNGRNSWINFITNLQELVEEGTVPMARIDDAVLRILRFKQRLGLFDAPLMKKEGSIGSDANRATARALVSESLVLLRNENNVIAKLTEYKRILVAGQGAHDIGMQCGGWTITWQGNHGAITKGTTILEGIQAAAKDKAAITYAEDGKAGGSFDAVIAVIGENPYAETEGDRNAQINIRSIDTDMLQEAYGYHCPVIVIMLSGRPMTIGDEYKNWDAFI

SEQ ID NO: 105791 - protein, 291 aa, Unknown
  Obtained from environmental sample
  DOMAIN (38)...(291): Glycosyl hydrolase family 10
  misc_feature (1)..(291): Xaa is any amino acid
GYEQAYILSFRREFGFTPGVLRRNRHLVKTTPSLLPFVKRAINKNDFLVGNISNEKYMNGAYFDMIKSNFNIITPEDGLKPISLTSNRGGAYNWSYADQMVNKTIENGMSIHGHVLVWHDWTPEWMTKGTKTEAEDNLKNHIIDVLAHYRGRIHSWDVVNEAMRDGLSPSDAAGDWKKCLRTDAPWYRALGEDYIETAFRTAREADPDITLYYNDYGLEFPQKAEAARKMINDINNRYKKDTAQDRNLIEGLGIQAHYQIKSFDENRIRSSLEKFKTLNIELSISELDVTA

SEQ ID NO: 105792 - protein, 261 aa, Unknown
  Obtained from environmental sample
  DOMAIN (116)...(254): RNA polymerase Rpb1, domain 5
  misc_feature (1)..(261): Xaa is any amino acid
GIDDIVVPKEKTEMIEKANKEVEAIQTQWRKGIMTQEERYNKVVEVWTRTNEDLTNIMMKTLEADRDGFNSVYMMANSGARGSRNQIRQLAGMRGLMAKPSGDIIELPIRSNFKEGLSVIEFFISTNGARKGLADTALKTAEAGYLTRRLVDIAQDVVVNEDDCGTINGISYSAIKDGEDIVEPLSDRIVGRYTLERVKHPITGELIIDVNEEITESIAAAIDAAGVDSVMIRTVLTCEAKHGVCRTCYGRNLATNRAVDI

SEQ ID NO: 105793 - protein, 275 aa, Unknown
  Obtained from environmental sample
  DOMAIN (82)...(195): MMPL family
  misc_feature (1)..(275): Xaa is any amino acid
ERQYGTVFDADFINRISDYTAEVEEIPIVKSVTSLINAEYITSKDDSIVVEKLLKSSFTGSQEEIAELKRRLLSWDMYERALFSDDFTATQILIPLSINSEQASSKQTSEYFIKIRDIAHKIFDNYATVHVTGMPVIIATVNEAMNADLKLLIPVVILVVLLILFISFRAFTPVVLPLISVVISVIWSVGAMPLFDIKLSVISTVLPVILVAVGSAYGIHIVTHYLLSREINNADISREEHNVLVIEVVNKIIKPVFLAALTTFVSFLSFCLQLS

SEQ ID NO: 105794 - protein, 271 aa, Unknown
  Obtained from environmental sample
  misc_feature (1)..(271): Xaa is any amino acid
IAGTADVYWQAVAPSILQTLSDADRAKLDFYSVPSGSWSLMVNPIPDKAPYTWTVNGTTEFNPFAIREVRFALNFLIDRKKLVDEILFGAGEATFTAMTPGQPGTYRYNLLASKFGFTATGNERKAIADIDAAMTTASNLPENRGKLVKRGQFWQYNGKDVSIKFMIRVDDPNGRLLAGRYVADQIEKAGIKVERLEYDRSKASNLAYNSDPAGYDWHLYTEGWGAGATRAWWDVSVSQMYAPYYGYMAGGAEEENWNYTNDRIDELAKEG

SEQ ID NO: 105795 - protein, 262 aa, Unknown
  Obtained from environmental sample
  misc_feature (1)..(262): Xaa is any amino acid
MWEAGLPIETYIPQKPYYMPGVIPSVFFNTTKPGLNDKAVRRAIAMVIDYDMIGTNAMSGYTAQKQASMMLPLPAEQALIDLDKLKPSQWTGIDVAGANKLLDDAGWVRGADGVRAKGGVRLAFRLECPMGWSDWNASLEVIAQAGRQIGMNLTTYFPESSVWADDRLNCTFDIIMDSPGGQGMASPWSRAYAMMYSKYLPPVGTVNMVGNWGRFSNARVDTLIDQIANETDAAKTKDLWTELNQIYLDEMPAIGLMYRPWV

SEQ ID NO: 105796 - protein, 175 aa, Unknown
  Obtained from environmental sample
  misc_feature (1)..(175): Xaa is any amino acid
MVHLLKTVFKSGKFTFGFSVIVAVFLFIVIYPMFDRRDPLAMGGGLYEKPNIKEYLARNKEGAGKSAGSEVEQDQEITDLLASWGIVAVTRDTGPIDLHILGTDNFGRDVMAQLVAGTKTSLYIGLVAGSIATIIGLTIGLLAGYLGGQLDNFLSSVTNIFIVIPSFIILILVSV

SEQ ID NO: 105797 - protein, 69 aa, Unknown
  Obtained from environmental sample
  misc_feature (1)..(69): Xaa is any amino acid
MKNDAKRIEQLERDIKKYQSSYYGGEAEISDGEFDLLWDELKALAPNSPVILGIGDSADNVDGFPKANT

SEQ ID NO: 105798 - protein, 225 aa, Unknown
  Obtained from environmental sample
  misc_feature (1)..(225): Xaa is any amino acid
KAAGGIPIEDADFSPHSSWIPENIINSWVGDYDGLCRPDCLKYGRLSKNKTGKWGIRYDGNHSIYSPKEGQHREVYNGQWEEYADEIVYYLNMQKQRSKYNDTETFNQEHNDSFKSYIANHAAYREELENKYNRIFNTEIGVPVKTYPVYIEGWLDNAKSLKPHQWQSVHHLYREGKGISALGTGFGKTLTAIALHALLKQEGRVNRAWFQVPNNKVKDWIKEIH

SEQ ID NO: 105799 - protein, 80 aa, Unknown
  Obtained from environmental sample
  misc_feature (1)..(80): Xaa is any amino acid
MPSAFVLIDKPPGITSFKALNAIKKQLGTKRVGHAGTLDMSASGLIVAAAGKCTRLLPYIEAQEKVYTFDLHLGNFNRYA

SEQ ID NO: 105800 - protein, 225 aa, Unknown
  Obtained from environmental sample
  misc_feature (1)..(225): Xaa is any amino acid
MTAQTNIFDGLIVDNFAGGGGASTGIELAFGRPVDIAINHDRSAIAMHQANHPYTKHYCESVWNIDPVEATGGQPVTLAWFSPDCKHFSKARGGRPADKNIRGLAWIAIKWARTVRPRVIMLENVEEFTTWGPLDSNGAPDKARAGETFNRFVRAFVELGYNVDWRELRASDYGAPTIRKRLFLVARCDGQPIIWPEATHGDPKLYHGILEPVANRRRNYRLVAA

SEQ ID NO: 105801 - protein, 63 aa, Unknown
  Obtained from environmental sample
  misc_feature (1)..(63): Xaa is any amino acid
CPFDTDAARYYARLAVLARQKGRGLPAPDGYIAAIAAECGYIVASRDTAPFEAVELNIVNPWL

SEQ ID NO: 105802 - protein, 285 aa, Unknown
  Obtained from environmental sample
  DOMAIN (1)...(100): Carbamoyl-phosphate synthase L chain, ATP binding domain
  misc_feature (1)..(285): Xaa is any amino acid
MLRTASLNIIKALGVEGGCNVQLALHPDKFDYAVIEVNPRVSRSSALASKATGYPIAKVSTKIALGYTLDEITNAVTGTTFAAFEPALDYVAVKFPKWPFDKFVYAHKELGTQMKATGEVMAIADTFEEALLKAVRGAEIGLSSLNLPRLAAKPDGEIRDMLKTVTDERLFVLYEAIKRGISVDELYQITKVDRWFLYGLVNIHKGLFDDNLPSPNNKSKPANDNPQSISDTVNKLIYKMVDTCGGEFEAKTPYFYSIKNGYENEALPFIEKSSQPRVVVLGSGP

SEQ ID NO: 105803 - protein, 64 aa, Unknown
  Obtained from environmental sample
  DOMAIN (1)...(50): Global regulator protein family
  misc_feature (1)..(64): Xaa is any amino acid
MIGDNISVSIIEIRGDQVRIGVDAPKTVKVFRQEVFDAIKAENKAAAGSKTALPVVDFGKQANK

SEQ ID NO: 105804 - protein, 242 aa, Unknown
  Obtained from environmental sample
  misc_feature (1)..(242): Xaa is any amino acid
VVASAPIQAFAGGICGLSIKSIIINCYNIGSISAVAYGASVGGICGVSYGTLSNVYWSSNAAQSVNGAVQMPKRGLGNDTNEAATTPLTLAQMQQAASFVGFDFASVWDIAPPASASYPYPVLRSLPRPLDVPKPYSAGDIAVINIIIVSNGLDWSLAEPADGSYLPDDWTGITWSETSEEKRIIELDISHSNLTGTLNLSGLTELQELDCSANQLSELDLSGLSELQTLVYQDNPLERLKL

SEQ ID NO: 105805 - protein, 267 aa, Unknown
  Obtained from environmental sample
  misc_feature (1)..(267): Xaa is any amino acid
AYVALCEFYFQTLPGQSLAAAALQIEQGRDPDGFVNKFDTTGKGAGIRLKESESLSYHWGAADMADSLGFELVERLVVEPTYTLTVIGGSGSGQYLAGQTVALSANVPEGQRFVCWLTEATVNLDAYSATISFVMPGYDLSLTAQFEADLYTLTVIGGSGSGQYLAGQTVALSANVPEGQRFVGWLADPTVNLDAYSATTSFVMPAYDLILTAQFEADLYTLTVIGGSGSGQYLAGQTVSVSANIPEGQRFVCWLTEAAGSTWTPTV

SEQ ID NO: 105806 - protein, 270 aa, Unknown
  Obtained from environmental sample
  DOMAIN (50)...(270): Cellulase (glycosyl hydrolase family 5)
  misc_feature (1)..(270): Xaa is any amino acid
IGIGLVLALGAAGGVLAEQSASLVFPLPTPGEAPAGSPVATHGKLSIANNKIVNKSGTAVQLKGMSFFWSNSGVGGIFYNERVISWLAHDWRVDVLRVAMGAETDGTNKGYSDGDKAGQEQLARVAIEESIKRGLYVIIDFHSHQEHRSEATTFFKDMATSYGKYPNVLYEIWNEPLGSGNSNSVSGSTIASYASAVGSAIRNTNGAEGIIIVGSPRWSSQPGDVNVSGVTNVAYSMHFYANQHGADYRSTMTSAAGSRAIFATEWGTTN

SEQ ID NO: 105807 - protein, 91 aa, Unknown
  Obtained from environmental sample
  misc_feature (1)..(91): Xaa is any amino acid
MIRKMNVFVGAALVVAVLCGTLFAQPAGSPVAKYGQLSVKDARIVDKNGEPVALRGMSFYWDRDGWFGYQFYTAGAVNKLVSDWNVDIIRA

SEQ ID NO: 105808 - protein, 135 aa, Unknown
  Obtained from environmental sample
  DOMAIN (2)...(132): Transposase DDE domain
  misc_feature (1)..(135): Xaa is any amino acid
GRGKKTKGRKRHIVTDVMGNILAVNVHNANKHDTKGGVFVFEKARYRYPSIQAGCGDEGYRGTFKNTFEWFHNIRIDISPKIKPDEGISPKRWRVERTFSWLGWSRRLSKDYEIKTVSEENMVIISHFHTLLKRF

SEQ ID NO: 105809 - protein, 97 aa, Unknown
  Obtained from environmental sample
  DOMAIN (2)...(95): Cobalamin adenosyltransferase
  misc_feature (1)..(97): Xaa is any amino acid
MGVIAGMPVPMEGMGEEYLVNLIEKLESELPAFASFAVPGANPASAKLHVARTVCRRVERRMISLVLDTETKAAIVPYINRLSDLLFLLAQKEAEKN

SEQ ID NO: 105810 - protein, 199 aa, Unknown
  Obtained from environmental sample
  DOMAIN (3)...(186): ABC transporter
  misc_feature (1)..(199): Xaa is any amino acid
FSQILSGETEHDKGEVSVGKGERIAVLKQDHFAYEEFPALETVVMGFQKLHDIRKEREAIYAKEDFSEEDGIRASELEADFAELGGWEAEAQAGQLLSGLGLDEEDHGKLMAELDESKKVRVLLAQALFGNPDILLLDEPTNGLDLESISWLEEFLIDFPNTVIVVSHDRHFLNSVCTHVCDIDYRRITPYSGNYDFWY

SEQ ID NO: 105811 - protein, 158 aa, Unknown
  Obtained from environmental sample
  DOMAIN (6)...(75): ATP synthase alpha/beta family, beta-barrel domain
  misc_feature (1)..(158): Xaa is any amino acid
MEYAGLNEINGSLVVLEGVAAPANQEIVRFKVRNGESVTEKTGRVVRIDGDKAVVLVFEGTHDMSLNNATARFTGRPMEIRLSEEILGRVFDGLCRPLDGMGEVYAETVRDVNGRAINPVAREYPRNFIQTGMSCIDGLATLIRGQKLPIFSGNGMPH

SEQ ID NO: 105812 - protein, 244 aa, Unknown
  Obtained from environmental sample
  misc_feature (1)..(244): Xaa is any amino acid
WGSTYANSMSLLALRDFMDSREQNTAGNTFKLNDGDGKLKPFTVKTAATAYFTNSKAGSVTPDGQSANRPFWVRLSRRYIPQALGGTAEPEQRGFAVKRDLFKIKKGAAPERVTIDKGGTTITVKSGAILEEHVQVVNPEERLFVAVTVPIAAGFEPLNPRLENASSDAVPTNKTTNGGDYSSFNDDRVVYFFERMPQGTYDFYFRSQAITEGEFSQPPARAEMMYQMNVFGAGAGGMVVVEKP

SEQ ID NO: 105813 - protein, 274 aa, Unknown
  Obtained from environmental sample
  misc_feature (1)..(274): Xaa is any amino acid
GAAGSYGFDYRIYKSGNLSTSTTTNVDASPENRPDWRHINFTDQNTATVVSSTIPLTNAWVDGATASGNIPEGVYWLDIRVFDRTGNVQVLQNVVFTVDYGPPQISPISASSVTRSPYPWNGYINASGAVTPEPFIFNDSFTLGGTVNELNIDRATGVTIKINDDTYAYALGSPVSGNTYSWSWNMGTPANGLPAWTAMPDGQYTVTINATDLSNKPGTAQSYTFIKDTMPPVISLNTIEPKIVNKTTWNNGTGADTTLTGASTIEATTNGQSA

SEQ ID NO: 105814 - protein, 184 aa, Unknown
  Obtained from environmental sample
  misc_feature (1)..(184): Xaa is any amino acid
MGKNETSAEVVSVVIAGSKNTELYLKVNDGKKSTFGKVLSPVKREPLFVAFSKSEAENYSIAPPDTLSLEIGLGLIPLVEKDKGTNLLKRIQNVRKEIALTRGIVIPLIRIVDNTLLDSSDYCIKIRGAEMGRGTIRMGHYLCINKDSVIKEIPGEKTLEPAFGLPSVWVNEELRDEAKRLGCT

SEQ ID NO: 105815 - protein, 269 aa, Unknown
  Obtained from environmental sample
  misc_feature (1)..(269): Xaa is any amino acid
TAEKIIREKEKFTPSLSVFDFDLDGAGEYIFQDDKLNCFIKSCGAGIFELDYLPCAWNYLDTMAPKTESIKSERRCSFVDWLAPSETLPEDLKAEGIKGGRFCGNEEYEATEIDRLHRRVVFSLPQKKDLLWGEIEIVKTWQLKKNSLALEYILKNSGTKSLSFIFSTSVDLSFSGEGDKFFKVLNLSEGEKENLPINNEGRIVRNVKILEFQDIKNEALIALESSRGFDGRIFPVRSGLAGQEEYQSTCLMTELPVSLEAGKTWKTSF

SEQ ID NO: 105816 - protein, 82 aa, Unknown
  Obtained from environmental sample
  misc_feature (1)..(82): Xaa is any amino acid
MSAIDPGHWVVLRLSALGDTVLTTGVLRHWHETRGLTFTVITREAFAPVFAGHPAVRRVVALEDADVRGLFLLARWRDLAAA

SEQ ID NO: 105817 - protein, 283 aa, Unknown
  Obtained from environmental sample
  misc_feature (1)..(283): Xaa is any amino acid
VILSNNANRYVRLGDVADVVLAAENEKNTLRMNGRPMISLPVVAQPGADQIKIADEVLKRVEEIKKDMPEGVVIQITFDNTHFVRMALSEVEETIVIAFLLVVAVIFLFLRDFRTTFIPMITVPISLIGVFFIIWILDFSINILTLLGVVLAIGIVVDDAIVVLENIYAKIEKGLEPKEAADKGVNEIFSAVISTTLVLCAVFTPLLFMQGFTGRLFREFAIVIGGSVLISAFVAITLGSMLSSRILRRGKHNRFYAATEPFFIPFLQIFKIFNKALSHPTLS

SEQ ID NO: 105818 - protein, 267 aa, Unknown
  Obtained from environmental sample
  misc_feature (1)..(267): Xaa is any amino acid
MVDADVYGGNAYSAYSGGGDARAMINKVTIGGGTLTGDVTGGVAISGNGTAWAYSNQVAISGGTVTGDVIGGDAYSPYSGGGDATVSGNQVTIASRVGGEVIGGHAFSVSGVVRANDNRAIMADSAVAERIFGGFAESTNGLAVAMNNRVGISGTVNKDAYGGLAKGGDISVSAIGNTISLAGGTVRGNAYGGYAATDWSGTARDNEATISGGTVSGSVYGGYASSSNGRAQATGNTISFTGGTVRATIYGGYATGGNESLATGHTV

SEQ ID NO: 105819 - protein, 245 aa, Unknown
  Obtained from environmental sample
  DOMAIN (5)...(156): FtsH Extracellular
  misc_feature (1)..(245): Xaa is any amino acid
GPKVREIPYSVFFLEGQAGKYSSVTLTGQDIEGTYKKPESDKGEVYETFKTVAPPWSQLGNSINAWTVEHMVEGDPTSGTKLDVFKAAKPSENNFYMFLLFWGPMLVFVLLWFVFMRQAQMGGNKAISFGKAKARALSASAKRVTFADVAGCDEAKAELAEVVDFLRDPSKFVKLGGKIPKGLLLMGPPGTGKTLLARAIAGEAKVQFFSISGSDFVEMFVGVGASRVRDLFEQGKKNAPCILFI

SEQ ID NO: 105820 - protein, 93 aa, Unknown
  Obtained from environmental sample
  misc_feature (1)..(93): Xaa is any amino acid
MKLVDGVLEKKEEFRNIFLELIPDWSPERLSTIDKIILQIAMTEMLLADTPIKVILSESAQIADKFSDENSPAFVNGVLQGFAKARGFITNDS

SEQ ID NO: 105821 - protein, 254 aa, Unknown
  Obtained from environmental sample
  DOMAIN (42)...(201): MatE
  misc_feature (1)..(254): Xaa is any amino acid
MGPDSTTAARPRSLGETLKSLAPRRRWPGVNGYRHLLGLGLPVMASNITISAMLFTNRLFLSHYSLEALAASLPAGVAYLTVTAFFQGLVSYVSVFAAQYTGAGRPRRAAAALGQGLYLSAISGLLIGLTYFSAPLIFRLGGHPPHIQELEVVYYRILCGPAVINLVFLTLASFLSGLGRTRVVMWGNLAGTLLNIPLAYLLIFGCRLGGRQIIAAQGVAGAAEAGVISWLLIALIFAAIVFNRKMEASHGVFS

SEQ ID NO: 105822 - protein, 272 aa, Unknown
  Obtained from environmental sample
  DOMAIN (1)...(159): Queuosine biosynthesis protein
  misc_feature (1)..(272): Xaa is any amino acid
GRRADTGGLVEAFILEPPPAETPAGPQELWCLVHPGRRVKPGSGLVFSRTGRAGHLTGRTLAADPEGRRLIRFDFEKPPARVFEEIGHVPLPFYIKRPDQAEDRDRYQTVYGVTPGAVAAPTAGLHFTREMLAELKKAGFGLAEVTLKVGAGTFAPLTQAQLEAGRLHREHISVPAETAEAVNQARRAGRPVVAVGTTAVRALEWAAEGGLAARTGWGDLFIRPGHQFKAVDGLLTNFHLPGSSLLMLTSALAGREKILAAYAEAVAAGFRF

SEQ ID NO: 105823 - protein, 85 aa, Unknown
  Obtained from environmental sample
  misc_feature (1)..(85): Xaa is any amino acid
MRVEYINPFVEAAYSVLKEVLNAEVKRGEIYLKPTSMSIMGVAALVGLAGDVEGRVLFDMTKDSALFVAGRMNGEEFANLDELAK

SEQ ID NO: 105824 - protein, 195 aa, Unknown
  Obtained from environmental sample
  DOMAIN (12)...(191): CheR methyltransferase, SAM binding domain
  misc_feature (1)..(195): Xaa is any amino acid
EADEFLEGFESPCTNQFWTESYAAPVRKILPNITSANINVWNIGSGKGYETYSFACILKTKYPNARIKIWANDNDIMAVSQAPNMVYNLEEVPEYCRPFLVRGTNGYSFNQVIKDSIVFEYHDITNDNTLPEVDIILVRDVVSFLPEAEQGRVIADFSEKLRNNGIVIMGRNEELSGIIWQSMSDDPVSAFLHSA

SEQ ID NO: 105825 - protein, 276 aa, Unknown
  Obtained from environmental sample
  DOMAIN (88)...(213): Signal transducing histidine kinase, homodimeric domain
  misc_feature (1)..(276): Xaa is any amino acid
KIKKACILTDVSLDASVSNIETAQAAPAPVPAPVQQAAPAPAPVQQAAPAAATPAAPAAAAAPAAAGGAAPKNAAASEDAKKAGKEAGSILRVDSKRIDDLLNLVSETVITKATFNQISMQFGVLTTQLREIENQYREKVKDLFDSLPAYLESIQDGKSVKDIRKEITENYGDMFTMFDPFETSFKASIAKFRSTSQNLGRITGELQEGVMRIRMVPISQIFSRFPRLVRDLSKSLNKKINLVIEGEDTELDKSVIEDLLDPIMHSVRNSIDHGIE

SEQ ID NO: 105826 - protein, 278 aa, Unknown
  Obtained from environmental sample
  DOMAIN (4)...(278): Cys/Met metabolism PLP-dependent enzyme
  misc_feature (1)..(278): Xaa is any amino acid
MRPETACIHAVRNTTHYTGAVAVPIYQSATFAHPSVGQSTGYEYTRTQNPTREHVEKLLAALEGGTDALAFSSGMAAVATLMELFSPGDEIIATDDLYGGSIRLFNHVSRKNGLNLRYLDTSDLSALRAVITGGTKAIFIESPTNPMMKVTDIAAVKEIIGDRDILLLVDNTFLTPYFCNPLALGADISLHSGTKYLAGHNDTLAGFLIVKSPETAAKLRFLQNTIGAVLSPFDAFLVTRGIKTLALRLEKAQENALTVARWLRGQPKVAAVHYAGLP

SEQ ID NO: 105827 - protein, 260 aa, Unknown
  Obtained from environmental sample
  DOMAIN (194)...(260): Helicase associated domain (HA2)
  misc_feature (1)..(260): Xaa is any amino acid
LAKIETITTRFIAEKREGDILVFLSGEKMIKECMNRLALSAAGKFLYLVPLYGRLGKEEQERVFEDAPKGKTKVVLATNIAETSVTIDGITAVIDSGLSKLNWYNPRSFTSSLIEAPISKASANQRKGRAGRTREGACYRLYTRRDFENRPLFTTEEIFRTDLSEVILRMADLGITNFEDFDFISVPEKEGLIAGIETLNLLDALEPDRSLSNTGRLMTEFPLAPRHSRIIVEAILCYPQVIYENIIAAAFLSTQSPYIL

SEQ ID NO: 105828 - protein, 89 aa, Unknown
  Obtained from environmental sample
  DOMAIN (1)...(87): Nucleotidyltransferase domain
  misc_feature (1)..(89): Xaa is any amino acid
VPVEQIYLFGSHAYGKPRKDSDLDLFVVLKDEVQLRDIEAAIKIRLAIGEHQSMPLDLLVMKKSRYLERKTAPTLERKVAREGMLIYEI

SEQ ID NO: 105829 - protein, 166 aa, Unknown
  Obtained from environmental sample
  misc_feature (1)..(166): Xaa is any amino acid
YYAATAAGTYAVTFDVAAANGWNAATGLSAGNLVIGSQANQTPAAADYDIGNLTQTFGNVTAVTITPKSGKSTGAVTIYYSGSTTLPTTAGTYAVTFTVAAASGWNAATGLSAGNLVIGSPVNQTPAAGDYNISGTGTFTYDGTAKAVTVTPKSGASAGSVTVLYN

SEQ ID NO: 105830 - protein, 133 aa, Unknown
  Obtained from environmental sample
  misc_feature (1)..(133): Xaa is any amino acid
MPDALYSNPDALTKGDKEVLRRSMRAARAALPSAGLARAAQSHILADPFWKAAASVALYMPLPGEMDTSLLWRAAADEGRQTWLPRCLSAPQAGAKMEFALCPSPSRLRPGAFGILEPDEGCTGLPEDTAPDL

SEQ ID NO: 105831 - protein, 172 aa, Unknown
  Obtained from environmental sample
  misc_feature (1)..(172): Xaa is any amino acid
VDECLRDTGCDEASFLSLSAGDFSGLGALFREAAGRCGREQVSLALPSLRVGSIDDAIMELLAGIRRTGVTLAPEAGSQRLRDSINKGVSEDDVLRHVRRLAAHGWQQVKLYFMIGLPGETDEDLAAIADLCRKVRDAAREADRGMPRLKVTASVSPFVPKAHTPFQWEEQI

SEQ ID NO: 105832 - protein, 271 aa, Unknown
  Obtained from environmental sample
  DOMAIN (1)...(271): 6-phosphogluconate dehydrogenase, C-terminal domain
  misc_feature (1)..(271): Xaa is any amino acid
MVHNGIEYGDMQLICETYDLMKNVLGISHDEMGEVFDEWNRGSLGSYLIEITRDILRYKDEDGQPLVEKILDTAGQKGTGKWTGIAALEFGVPLTLIGEAVFGRCLSAAKDERVRAARVFSSAKAASEAAAHVDKAAFIKDLEKALYASKVVSYAQGYLLMREAAGQYKWNLNYGGIAMMWRGGCIIRSVFLGKIKEAFDKKPDLENLLLDPFFAGVIEDAQGSWRRIVTAAVQNSVPVPAFSSALAYFDGYRSERLPANLLQAQRDYFGA

SEQ ID NO: 105833 - protein, 259 aa, Unknown
  Obtained from environmental sample
  misc_feature (1)..(259): Xaa is any amino acid
MIVIVAIVAGGIAVIELMKASDISMRLSLRGLNYLAREQARYWQGREESYIKQLTVIADIMGEFEMLPVQDRRDQYDNMLKATLNNNPNFVRIFSIWKPNAMDGMDSQYIGRPGSSPTGQYAMTWGRDTGPIEVKPNHILNEINEWMNGPNALKTRVENPTPFTNSGKDTFIFRIGVPITRSTSNEVVGHLCVLIDIAPVQAVVEKTIKDYEEISAMVLYSGNGMIMGHLVPERVGKMLSDADTIYGNYMQEADRAVRK

SEQ ID NO: 105834 - protein, 282 aa, Unknown
  Obtained from environmental sample
  misc_feature (1)..(282): Xaa is any amino acid
SAGHADPISSEEEDLDSKDYVAVLIKGGKVTSSNTIKDKATVMLTSAGRIDTAANTYVRLEVTGGVVENTSTGNAVSNETADNIYITGGTVSTESGIAIDNRAVDAAVKISAGKVTTKSGTAVNNQKQIAARDNGVAAATITFPALRAASVIISGDATVSADTGYAVYNAEKGRILIQGGTVISGNSISNQGTVFQQDIADITELITIEGGLVENTGGGNAVYNASTGRITIGITVDLDDDEATNTYPIVKATTGSAVYNNKADTSTGYTGASPAKNQYQLF

SEQ ID NO: 105835 - protein, 268 aa, Unknown
  Obtained from environmental sample
  misc_feature (1)..(268): Xaa is any amino acid
GGRHFFLLFFGYSNRIYQASPTLDLFYQRQEPNGAIRSAYNIETGLPVVEDDNPEGLGLPLFAWAEFNLYHKSGNKKRVKDVIPILHKYNEWIDSVFKQSNGLYRVPLSATGMPNAPREKAAYPLDFNSIMAVNVLYLSAMTDILNEKDSSFQYKKQYFALKTRINALMWDNEGGFYHDIDKNERRLPVKTLAGYWPLLAEIPNEDKAERIISRLSDPGYFGAPHPFPCVAINEKTFDENGHGYRGSVFPHLTFMVIKGLERYKRWDL

SEQ ID NO: 105836 - protein, 99 aa, Unknown
  Obtained from environmental sample
  DOMAIN (9)...(97): 6-O-methylguanine DNA methyltransferase, DNA binding domain
  misc_feature (1)..(99): Xaa is any amino acid
VRFPLSPAGTDFQQAVWKLLLEIPYGETSTYGAIASRMAIAGRKASAQAVGGVVGHNPISLLIPCHRVIGSDGSLTGYAGGIDRKRALLELEGKLNLSL

SEQ ID NO: 105837 - protein, 208 aa, Unknown
  Obtained from environmental sample
  misc_feature (1)..(208): Xaa is any amino acid
MKNDSLVYDTGKTRDIYPTDGSMGYTTIREKVEGEKGKVITVEMNKQEYNAFILDETGKANNLRIGTVVNFLYKPNTAPDGTDLVAIKMRMYKGRLKSGNKYENVTFIPKLLSEKEVQEIKNPSSIPSLSVQAPPPLPPAIKYSIVISDVIYGPYEMDQITQMVQKGTITKETLIWKEGMSKWQPAGLVSDLIDIWRFSPPPLPDANN

SEQ ID NO: 105838 - protein, 78 aa, Unknown
  Obtained from environmental sample
  misc_feature (1)..(78): Xaa is any amino acid
SALVFVGKNGIGPWQNMEIRAFLSEFVNRGCPVIPVILENCTEVPELPLFLRQMTWVDMRKTDPNPISQMKWGITGKR

SEQ ID NO: 105839 - protein, 281 aa, Unknown
  Obtained from environmental sample
  DOMAIN (2)...(278): AMP-binding enzyme
  misc_feature (1)..(281): Xaa is any amino acid
ARHYPFGLFAVPRETIVRIHASSGTTGKASVVGYTRRDLDNWAELMARSLAMSGATANDIIHVAYGYGLFTGGLGAHDGGQRLGATVVPASGGATKRQIQLIRDFGATVLCCTPSYALHLFETAQEMGVQPRDLRLRIGVFGAEPWTEEMRQDMERKMGIDALNVYGLSEIMGPGVAMECVDGKNGMHIYEDHFLPEIIDPGSGERLPIGAVGELALTTLTKEGIPLLRYRTRDITALDATPCRCGRTHYRLRRFAGRSDDMLIIRGVNVFPSQIEAILLE

SEQ ID NO: 105840 - protein, 227 aa, Unknown
  Obtained from environmental sample
  DOMAIN (1)...(113): RNA pseudouridylate synthase
  misc_feature (1)..(227): Xaa is any amino acid
APGFLHRLDKDTPGLLVVAKTDLAHRELTRQLEDRILERTYRAVIWGILRDQEGEIDAPIERDQRNRLKMSVQAEGKVAKTNYKTLETYGIASLVEFKLNTGRTHQIRVHARYLGNPVVGDPLYEGREESSKRIDTIYKPVAEKLLEFAPAQLLQSYKIKFKHPKTKKAMEFKIEEDESLKKALDFLRKNRGKNNLPVQLFEPPQIFANPEDIELPPEEMKKCLERT

SEQ ID NO: 105841 - protein, 74 aa, Unknown
  Obtained from environmental sample
  misc_feature (1)..(74): Xaa is any amino acid
MGTQELFKPNSYVYFVGIKGTGVCALAELVYNSGIKVSGSDISEKFYTDEILRDLKIPYYEEFDAAHIGQDIDM

SEQ ID NO: 105842 - protein, 125 aa, Unknown
  Obtained from environmental sample
  misc_feature (1)..(125): Xaa is any amino acid
MTLTLKKNAGSVYTSIIAQLENLSSKQKDLTKRISICSVDELGTIAGMVNVFCEHLGDGIGTIKYKINGLNHTSFELSANMDKTSTAVDHISSNLDNMENLVVKQENGALVAGEAVEVIKQILTA

SEQ ID NO: 105843 - protein, 270 aa, Unknown
  Obtained from environmental sample
  misc_feature (1)..(270): Xaa is any amino acid
MREETLAVIAVLALSLGVLLTGMFPSYGGMLATTLLMSTGFHFFEANNQSLIMQAYDTRIAPLVMGRLRGLTAGGNLLAGTLILGCASFLGFPLMYLIVGCLALCAALYALSRRPDCSGLPKQRAGVVLKKRYRLFYALTMLAGARRQIFTVFSVLLLVERFEYSITGISVLFIINNAINWFLNPLIGKAINLWGERRLLTLEYLTVLGIFCGYALLDNPLIICILYVVDQVVFNFAIAVRTFFQKIAAPEDIAPSMAVSVTINHLAAVG

SEQ ID NO: 105844 - protein, 176 aa, Unknown
  Obtained from environmental sample
  DOMAIN (1)...(176): Uncharacterized protein family UPF0027
  misc_feature (1)..(176): Xaa is any amino acid
MQHAKLTLTLPWEDIDAEAQRQIRKTLEMPELARLVIMPDVHAGYDLCIGGVALLRGVVCPSFVGYDIGCGMCHVDTGKSLAELGLDTKKNREDMFALLQQRIPAGLGKRRGSDGNVRFRSACGDKALGERVTALAAEQLGTLGSGNHFLELGVNAAGRLGITVHSGSRRCGYDIA

SEQ ID NO: 105845 - protein, 274 aa, Unknown
  Obtained from environmental sample
  DOMAIN (196)...(274): Response regulator receiver domain
  misc_feature (1)..(274): Xaa is any amino acid
VASLIHDATQMNMMRIGSREIRFELQIDPFVPAELFGDQLRIKQILNNLLSNAFKYTESGEVVLSVTAKYEDRVKNPYVSLIFHVHDTGQGMTKEQVSKIFDDDEYTIFDQEANRETGGAGLGLVITRQLIRMMNGSISVESEPGKGSTFTVRLPQKNTGAASLGEETAENLRQFRYKDISQTETVQIIREPMPYGSVLIVDDVETNIYVAKGLLTPYGLTIDTAGSGFEAIEKIKAGRLYDIVFMDHMMPNMDGIEATKNIRDLGYTRPVIAL

SEQ ID NO: 105846 - protein, 65 aa, Unknown
  Obtained from environmental sample
  misc_feature (1)..(65): Xaa is any amino acid
FFDGEVAGVITESPSGTGGFGYDPIFYLPEKRATMAELSLEEKNELSHRSRALRAFLSWLNDTAR

SEQ ID NO: 105847 - protein, 200 aa, Unknown
  Obtained from environmental sample
  DOMAIN (1)...(48): S4 domain
  misc_feature (1)..(200): Xaa is any amino acid
MRLNRYLASCGLGSRRAMDTLIASGRVQINGLPLEGPGQPVDPARDTVTLDGRALSLPAEKIVLAFHKPVGVLTTMDDPEGRPTVADYLSDFPFRVFPVGRLDMDSAGLLLFTNDGKLAHRLAHPRYGVEKEYRVLVAGRITPGSIRALEEGVELEEGVTSPARVRIPDARISSSAGRNILHIVLHEGWKREVRRMCAAV

SEQ ID NO: 105848 - protein, 234 aa, Unknown
  Obtained from environmental sample
  DOMAIN (1)...(95): Malic enzyme, N-terminal domain
  misc_feature (1)..(234): Xaa is any amino acid
VAVVTDGTAVLGLGDIGPEAGMPVMEGKCVLFKAFGGIDAVPLCIRSKEVDVIVETTALLAGSFGGINLEDISAPRCFEIERKLKTRCDIPIFHDDQHGTAVVTTAALLNALKLTGKKLDNINAVILGAGAAGTAVARLLLALGLGDVVLCDKQGAIYKGMPNLNNEKAKIAEISNKEMKKGSLADVIRGADVFIGVSAPNLVTAEMVKSMSHDAILFPMSNPVPEIMPDEAKA

SEQ ID NO: 105849 - protein, 85 aa, Unknown
  Obtained from environmental sample
  misc_feature (1)..(85): Xaa is any amino acid
VAARGLDIPGISHVVALDVSEDKDAYIHRAGRTGRAGKKGIMVSIGDEVEMRRLAALEKKLGIVVYPKELYGGKVCEPIQVTDNR

SEQ ID NO: 105850 - protein, 279 aa, Unknown
  Obtained from environmental sample
  DOMAIN (1)...(101): Response regulator receiver domain
  misc_feature (1)..(279): Xaa is any amino acid
MILEEILKDEFNVITASNGREAFEMLGDAVSLPKLILLDLIMPEMTGREMFELMKTNEKLKRIPVIFITADNASESELLAAGAVDFINKPFLPEIVKLRVRNQIELKKYSDNLERMVAEKTAEATKTLDNALQGLANVIEHRDLESGEHVKRTQLFVKALVDFLIETESVYAEELVSFQPDMIMKAMALHDVGKIAIPDRILLKPGKLDPDEYEIMKTHTTRGKEIVSELRDVNTSLYLKHCKDICYGHHERWDGNGYPRKLKEKEIPLSARLAALADV

SEQ ID NO: 105851 - protein, 265 aa, Unknown
  Obtained from environmental sample
  DOMAIN (2)...(265): Domain of unknown function (DUF323)
  misc_feature (1)..(265): Xaa is any amino acid
MAAKDMVWVKGGTFTMGTSGNTTTEIQHRVTLSGFWMGKYEVTQEMWQQVMGNNPSYFVEWISGENDTPNKLPVEQVSWYDAVEFCNKLTVQEGGGLQPVYTITNRTPAEGYPIADATVTADFTKNGYRLPTEAEWEYACRAGTDTLYNTGDTLSDNTGWNKANSAEKTHKVGLKPSNQWGLYDMHGNVAEWCWDWYAANYGGTTPQINPTGPSSGNLISPPGSGEPFIPYRVFRGGSWGAIFIGLLNGSPLTGTWTFDSIYYYT

SEQ ID NO: 105852 - protein, 247 aa, Unknown
  Obtained from environmental sample
  misc_feature (1)..(247): Xaa is any amino acid
MVTSKPIKITVVAKEEGKLYAKRPVITAQPQSKAYLVGTDPQEAVSLTVTLRATQPNDPEVGTITYQWYKTANGDTADGEAIEGDAGTGISYTPDISDVGFMYYYVVVTNTILPGEDVEEETGNRTSDPARIDVVAEARKPRITSIEGLDPGKVGKLYEDNTQTILPLKVVASSLDDGNLKYQWYRIDLDNIETPVGDDHPSYTPTPPSYNIGTTRSMYYYYCIVTNTPRAFPELGRSATDETVQVY

SEQ ID NO: 105853 - protein, 184 aa, Unknown
  Obtained from environmental sample
  misc_feature (1)..(184): Xaa is any amino acid
MRDNRRNKFDDITRRILEAFTAKDALVSVAVVVLGFLVATLLLLIIRKNPGGMYKAILQVISGLSENRSGDWSWNPRYIGEWLVSSIPLILCGLSMGFAARTGLFNIGAEGQYIAGLTAAQLIACYFPAVPVLHWLIAVLGAITAGALWGGIVGFFKARFKVSEVVATIMMNYIALYAHRIITL

SEQ ID NO: 105854 - protein, 278 aa, Unknown
  Obtained from environmental sample
  misc_feature (1)..(278): Xaa is any amino acid
MAKEKSIELFEQDAEFWRAAIEINALTLFFVPDEYKTEELCELAVIRNGNALIYVPPEMKNYELCRKAVYNNAYTLRHVDDELKTRELCRMAVKSTGSALEYVPRKFITPELCAAAVKNSEWALEFVPEEMKTPELCAEALKKDSRLLKFVPETQKTKELCLLAVSSNEFEDLRLFVSGLHCALAYVPEALLTKELCLDAVLKESESLEFVPEKFKTPELFLTVARKKHWALEIVPDDLKTYELCLAAVKVYGPSLKYVPENYKTKEILDAALEENGC

SEQ ID NO: 105855 - protein, 72 aa, Unknown
  Obtained from environmental sample
  DOMAIN (2)...(72): S1 RNA binding domain
  misc_feature (1)..(72): Xaa is any amino acid
MGKNDSIQVEGTITESLPNAAFKVLLDNKHEVLAYISGKMRMNYIRILPGDKVLVELSPYDLSRGRIVYRYK

SEQ ID NO: 105856 - protein, 170 aa, Unknown
  Obtained from environmental sample
  DOMAIN (16)...(129): PAS fold
  misc_feature (1)..(170): Xaa is any amino acid
MLKQTDESDERTQIIFDTVPIGCCMFDKNCNIIDCNQEAVRIFEIPDKEIFLKKFSELSPEYQPCGRKSSDMALENNNKTLHEGCNRFEWMYQTFNGKTLPCEITQAPVKYKSEWVVAEYIRDLREQKALLNEIRNENEKNRIIMDKQAQTEAASSAKSFFISAVSHEMR

SEQ ID NO: 105857 - protein, 108 aa, Unknown
  Obtained from environmental sample
  DOMAIN (28)...(101): ACT domain
  misc_feature (1)..(108): Xaa is any amino acid
KIQNSDNNYTRFICISKEPEIYPGAGKTSLMLALQHKPGALFNILAKFNARNINLIKLESRPISGQDFEFMFYFDIATPTITEGLIQLLAELEQETGTFSYLGTYQEL

SEQ ID NO: 105858 - protein, 274 aa, Unknown
  Obtained from environmental sample
  misc_feature (1)..(274): Xaa is any amino acid
VSREAGRCTVRKAYQQTLIAAANNGWKIGSEQSAYVHAREIHAALKLYVKGGSRALDNMFYIARDLTGLRPFQIVVGDQHRFDFWVTDDQGVYFRPECYLWLDMRTRLVYGIAFDRNYNTRTVLRALKEGVKRFGKFESTYNDNGSGEKSAVADYTIEQLQNYGMKFCDEGDLYRTETGAYVVEGADGKMVNVARSRVEWKKQNRRIYANVKNAKTKPIERFFSTLEQILRDMITPGLVIDAAGNAATEEESSRRLQWQKDNGYILPFEDFVFR

SEQ ID NO: 105859 - protein, 271 aa, Unknown
  Obtained from environmental sample
  misc_feature (1)..(271): Xaa is any amino acid
MSLRTMLTANRLSLGQAAKLLDIDKSTVSKICSQSYPNWEQKEEECIQQLAQKGYNKIVPDQFTVNTDVVVPTRSVDAFNSLADDLADPEGSQCSSIGMVIGTAARGKTHTAQWYTKNHADACYVLFVEGSTRVQLLRDICEALTNARPITFGGCLDLIHNVCAKRHRLIIIDEADKMPISFLELVRGINERCKVPIMLSGEEALKAKVDRVPRLRSRIRNPVVLYEPIGPVDVAAFYGLACGIEIEQETAETLTKRAHGAWRVLVNDALA

SEQ ID NO: 105860 - protein, 148 aa, Unknown
  Obtained from environmental sample
  misc_feature (1)..(148): Xaa is any amino acid
RRGVKPDDHWLFVADANSTIWDFYEISYGNQPDTAVKPERELGISVGSRYIPAVNVLSSKYWEKIHYGAGVRYATLPNSKKLDRAYEYTFSVGAGLPIPRDGGMVDIVLSYGKRADPVYKGYEENIVKLQLGLNGSRNWFQKDASKEY

SEQ ID NO: 105861 - protein, 193 aa, Unknown
  Obtained from environmental sample
  misc_feature (1)..(193): Xaa is any amino acid
VAKYIAKNSELIKNWPAWVQEVAVKYGSKTANLYIIHGNIRDFLPKETEEGEFIFAEIHQYIAEIIFGNQDIIAYFNPSEGVSFCTEGMAREYETALSKSFPDTDTSEFISREPEKSFYYLEKYFQMRIPKDRRNPSPRMVLIIDYAEYIIPGGDMLRLSDADRFCLVTLNRWANNTDFTEGDVSIILLPENL

SEQ ID NO: 105862 - protein, 187 aa, Unknown
  Obtained from environmental sample
  DOMAIN (52)...(149): Cyclic nucleotide-binding domain
  misc_feature (1)..(187): Xaa is any amino acid
MYKTGIQGSPKSFMANQTRKNEAQDLSAILKSELFSDLLPGEKKIIVEKTEILLIRRGGLLFSPAEKAEHFYLLLEGNIRVYKNNEGGAAGLPREEEVARFASGDIIGEFDFARSAEYDAYAEALEDSSLLMFPNFELSMADFALEEPHIISRILLNSAAMVTARIKASRKLLFESVYWVQELHRKI

SEQ ID NO: 105863 - protein, 160 aa, Unknown
  Obtained from environmental sample
  misc_feature (1)..(160): Xaa is any amino acid
MKVKFAIIGAGPAGLSFAAELKRRGEQSFLVLEKEKEAGGLCRSAVWNDAALDIGGGHILDKKKKHILRFLFSYMPECEWNSYERDSRIAIGKTIVGYPLEANIWQFPLEEQLDYLLSIAATGSVTGKPMPALFTDWIYWKLGDKIAETYMLPYIKRYGH

SEQ ID NO: 105864 - protein, 128 aa, Unknown
  Obtained from environmental sample
  misc_feature (1)..(128): Xaa is any amino acid
ADKVTLWGDGSPYREFLFSDDLAEALLFLMNTKDASEIGELINIGVGADLTIKELAELISKIVYADEQGKHCEIEWDTSKPNGTPRKLLNVDKLSSLGWKAKTSLKDGIGIAYQDFLKQQKKVRRNES

SEQ ID NO: 105865 - protein, 202 aa, Unknown
  Obtained from environmental sample
  misc_feature (1)..(202): Xaa is any amino acid
MPYLIDVLNEIDNCKSPWDSVRHKYLQLLHQKTGRNIIGYYSGWLQGKVGESTIITDNDKNGFMNATHGLDRTIGLDLLLHTPGGDFAATESLVDYLYQMFDKDIRCFIPQIAMSGGTMMACACKEIFMGKESNIGPIDPQFGSIPAYGVIAEFQEAVDSITANPNSLPIWQTIIGKYHPAFIGRVSQHNRASRRDRQQMAH

SEQ ID NO: 105866 - protein, 234 aa, Unknown
  Obtained from environmental sample
  DOMAIN (4)...(230): FGGY family of carbohydrate kinases, N-terminal domain
  misc_feature (1)..(234): Xaa is any amino acid
MGRYVMVIDEGTTGTRALIFDKKFNVISQAYEEITQHTPKEDRVEHDPEEIYEKSMAMCRKALESAEINPKNIDCIGITNQRNTLVMWDKTTGKPLHKAIVWQDTRIGDVCEEIKKTEWFDKILQTTGKVSAPHCVVLLAKWLIDNIPEIKAKVEKGEALLGTIDSWLVWKLTAGKVHATCFSNASSGGYLDIHKGVLASKFLAHFGVPESLFPKVQSESSDYGVTEVFGVPIP

SEQ ID NO: 105867 - protein, 225 aa, Unknown
  Obtained from environmental sample
  DOMAIN (142)...(199): BFD-like [2Fe-2S] binding domain
  misc_feature (1)..(225): Xaa is any amino acid
MKTPSGNPLWGPSAKEVPDKEDCSVDREDLDELFGKVFTDGVKPKDIINFFSGVRASLYSEDFIIEASERVQGFVHVAGIQSPGLASAPAIAALVEEILLDKMPGVAPKENFDPRRKAPVRFANLSREEQEALVAQNPKYGHIICRCETVSEGEVVEAIQGVVPARSMDAVKRRTRCGMGRCHGSFCGPRVMELLSRESGIPYEKVTKRGEGTEMLFTTTEITRE

SEQ ID NO: 105868 - protein, 94 aa, Unknown
  Obtained from environmental sample
  misc_feature (1)..(94): Xaa is any amino acid
MNTECSLRVRSYECDGYNHVNNANYLNYLEYARYEFLKDIDFDFVKATKAGYGLYIARIEIDYKKARVYRRRTGYKITFRKTRRGKRRIAQEIG

SEQ ID NO: 105869 - protein, 288 aa, Unknown
  Obtained from environmental sample
  DOMAIN (96)...(248): ABC transporter
  misc_feature (1)..(288): Xaa is any amino acid
DGWRAQMLAQMPSIFKFNLDTPWAKLSETTRQLLLYGTKRAMRFSYETKDRHYTFSHNYEGIIGNLERRYGETSSEEIRADMEQYMQVIPCEACGGQRLKPEVLAVTVGGMNIAEVVSQSVRDAKAWFLGLALEGKDAVVAEKLLKEILERLGFLDDVGLGYLTLNRSAATLSGGEGQRIRLATQIGSKLQGVLYVLDEPSIGLHQRDNHRLLDTLKEMRDLGNTVLVVEHDLETIREADHLVDLGPGAGEHGGHIVAQGTPAQVAATKGSVTGEFLLGADRIAVPKM

SEQ ID NO: 105870 - protein, 78 aa, Unknown
  Obtained from environmental sample
  DOMAIN (1)...(63): Global regulator protein family
  misc_feature (1)..(78): Xaa is any amino acid
MLVITRKTNESIIINDCIEIVVTGISRDGVRLGINAPREMGIYRREVYESIAEANRSGAGATSALLKAKLTKLKPPTE

SEQ ID NO: 105871 - protein, 271 aa, Unknown
  Obtained from environmental sample
  DOMAIN (1)...(168): Carbamoyl-phosphate synthase L chain, ATP binding domain
  misc_feature (1)..(271): Xaa is any amino acid
GIAVSPIHQILAEKSVAGWKEIEFEVMRDHSGNVITVCSMENFDPVGIHTGDSIVIAPAVTLSDKEYQMLRSAALDIICALGVEGGCNVQFALNPDSFEYAVIEVNPRVSRSSALASKATGYPIAKVAAKIAVGYDLDEIVNAVTGTTYAAFEPALDYVAVKFPKWPFDKFVYAHKELGTQMKATGEVMAISDTFEDALLKAVRGAELGLTGIDFRRLSPKTDGEIRGLLKTVTDERLFILYEAVKRGISIDELYAATKVDRWFLHGLANI

SEQ ID NO: 105872 - protein, 188 aa, Unknown
  Obtained from environmental sample
  misc_feature (1)..(188): Xaa is any amino acid
MIPLYKLEKLPRTQKLRKIAKIFTMAETRLSSLLAGSLLASGLPASNLQVNSLPTSNLQASSLMAGKSGDVFNGQETAFFVDAAKLLAEDGLLSVDAKKAIIESMGVFQAAITAPISDFSMFLRALNNVKHILLAETGKDQADWDFTGSDGRLDPKKRQVFEGMWVYMEDIRSPFNVGAMFRTAESFG

SEQ ID NO: 105873 - protein, 67 aa, Unknown
  Obtained from environmental sample
  misc_feature (1)..(67): Xaa is any amino acid
LKGSHVAITGVEKHFGDFHALKSVSIDINKGEFYSLLGPSGCGKTTLLRIIAGFEDPSAGAVLLDGR

SEQ ID NO: 105874 - protein, 290 aa, Unknown
  Obtained from environmental sample
  misc_feature (1)..(290): Xaa is any amino acid
RQGEELRGRANLEKYINDKTQILVNQRVLKDNAAISYSIGERLENGAYPVTLTIKVEDSWNIIALPKPVYSTNTGFELTIKARDYNFLGTMNPLRVDLGYHHDENERDSFVLGVFSSTPFRAFGYTWNIKFDNTFNYRPDVNEPYYYQNITGLSMELPFHTTTFTFGFEESFNLNEENDDRYKEKYGNFQSGLYTSSKLFTSWKIPTGLMVSRYGELTYNPGVSVTFNHELPEWPLHEIRKGPFMGFSHSLGFEKIDWYANYRPGLSVSASNSYKYDFYGLDAEKNPLSV

SEQ ID NO: 105875 - protein, 226 aa, Unknown
  Obtained from environmental sample
  misc_feature (1)..(226): Xaa is any amino acid
MRGQAATFNWNIGSVINFLRQADAEYPEWKVTFVDPDLHGYKWVEDYNNNNLAISAFSRKKERAMMALNELYSNKEINRLIRYGIEGVHHININDTHYSTTDRTSRYPINGNCPAWVLKNPAFTLEPFIENPTAFELKEQEVRRVWEQNQVPPHPLNRFTLDTSNITTQIAMINTIEAQHFVPLISGMAGDVNTAIATLRTQLQRAGIQDVITEAERQIQRYMAER

SEQ ID NO: 105876 - protein, 282 aa, Unknown
  Obtained from environmental sample
  misc_feature (1)..(282): Xaa is any amino acid
YQIGFIYAYPATDGILDGNYILIDGQQRMTTLVLILLALSVEKERQPDKFKRDCLNKNEKLILDYKVRESSHEFLQEFVKYILNGKRIDDIKDEYWYFAEYENDTTVKKIIENYNVIRNFIVDPELPFDYDYVLNCIEFWYYDTSTSDQGEKLYLYMNSRGETVSPNESIKANLLRHYSTSKKRAWGEKWEEWQILFWRKKRENPNADKGINEFLMLIKIIELTKQKKGETDEISALSGEIEKIKKLEKFDLHELSLEPLEIIERYYEALQKLIALDGELEF

SEQ ID NO: 105877 - protein, 260 aa, Unknown
  Obtained from environmental sample
  misc_feature (1)..(260): Xaa is any amino acid
VTGVVEHSVPIRGVAYSLDQKNYTDIPFVSRVGRTWFNYFCDFNTLGKTKGGQLAFRVTDASGITADIIPEYTIEPNPPIPTIIVNSPTDEETITSHFDISGLAYDDVGIYGVYWRLLGPKLESISKTPAGEDARRAAVVFATNRNVPFQELLTEQNFSIPIDFSIVTDGEYTIEIYAADIYGVRSETISRVIRVSTAPPKTEVLSPPITRYNRKAIMVNGYSSDANDIEEVFFSMDNGSTYQKVKLAADGNWELALNTA

SEQ ID NO: 105878 - protein, 115 aa, Unknown
  Obtained from environmental sample
  DOMAIN (6)...(115): Protein of unknown function (DUF1538)
  misc_feature (1)..(115): Xaa is any amino acid
MEAFSSVLPITAIVLIASVILTPMPSGTILMFLVGAALLIIGMGFFTLGADMAMMPMGEGIGIQLTKSSKLALILFVSFVMGLIITIAEPDLQVLAKQVPSIPAKDIIFTVAVGV

SEQ ID NO: 105879 - protein, 225 aa, Unknown
  Obtained from environmental sample
  DOMAIN (124)...(209): PhoU family
  misc_feature (1)..(225): Xaa is any amino acid
MEKAKHNETELKALKEEMSLMWRLVLSQLQKCKQAYLTNDTELAREVISREKRVNSFELKIDSDCENYIALFAPVAVDLRLVLSLMKISSALERIADFAEGIAKHVTIEEYHSITAKLKEDLKIETMFDTVISMLSDSFAALESENTKLSGKILQKDDEVDTLFVEGKEFLAKYIQKESSHSDCILETLLILRKLERIGDHCSNTVEEIVFYIDAKILKHAQSRE

SEQ ID NO: 105880 - protein, 191 aa, Unknown
  Obtained from environmental sample
  DOMAIN (32)...(191): PP-loop family
  misc_feature (1)..(191): Xaa is any amino acid
MGREKLGYARKLCVKAAGKAMQQARMCHPGARIGVALSGGVDSFVLLKTLSLRRRIVPFRFDIMALHLNPGFDPHNHEALFPWLEHNGIAAHVECTDYGPHAHSSENLRRSACFRCAWLRRKRLFELCARYSLTHLALGHNADDLESTFFMNLFQNGRVDGLSMREAFFGGKLTLIRPLLLVRKKDIIRAA

SEQ ID NO: 105881 - protein, 232 aa, Unknown
  Obtained from environmental sample
  misc_feature (1)..(232): Xaa is any amino acid
MKRVLFFLLGIIALGAICVGVAVMRLDAQGIRDQVAEAVSGATGKPLVIQDIPQISLMPLGVKFGAAYWGITPDGKVDPAGGISVAVKSGQVSVQLLPLLTGKVLVDEVRLDSPDVQVRLEQGAHPAKVPPPRAADSRVADSRTALDPPIPPQVEVNRLRVTNASLLLEISPGQAVRLSGLAMELDNLKPGAEMRLDLSTDLAVSSPALEGTLALKAKARLQAQKYELRDVT

SEQ ID NO: 105882 - protein, 276 aa, Unknown
  Obtained from environmental sample
  DOMAIN (45)...(272): Bacterial extracellular solute-binding proteins, family 5 Middle
  misc_feature (1)..(276): Xaa is any amino acid
SSRDELVTVFSKTELELDFRKSYFASEAQIYTAIYEGLFSYHPLTMEPVLASASGYRISENKKEWTFTIRENARFQNGDPLRAEDFRAAWLSLLEPGRDSPYSSLFDIIKGARDYRLGKISREGVGISAPNEKTLVVQLNSPASFFPSMLCHHSFNPIHPSMLKEEKWTDTVSNGPFLIDEINEDMIVFSKNPNYWDAGHVSLKRLIIKFAEDGDQAAAMWNSGDGRWIQGDVNYDALTDRSGIEVNAMFATYYYYIRSAREPWNDYRIRRALSLV

SEQ ID NO: 105883 - protein, 239 aa, Unknown
  Obtained from environmental sample
  misc_feature (1)..(239): Xaa is any amino acid
MGRYQFRPGPAYRHYNYACLKNRPFVHTIEVDIEYLLCNKGDRIQYAGDLALTGSAQGRITEMLWSEDVGRYVGIRVDEPVETEAGKRYAVRLRLSDGTVLLKDVATVRQSDEIYFTEPFAPDGAPADDDIYAFGIRGQEVIDLIITDIQPQADLSAVLTCVEHSPAIFNVDDPNFILPEFENKITPVSGAVDSGVVGPARWRLFVTYHDSEIEPPRPQGDGQDNDWHYAHTTQALWQS

SEQ ID NO: 105884 - protein, 282 aa, Unknown
  Obtained from environmental sample
  misc_feature (1)..(282): Xaa is any amino acid
APVASDFNVSGLTQTYNGSVKTVTITPKEGKSTGAITVYYNGSITAPSAIGTYTVTFDVAATTGWNAVSGLSAGTLTINAAFTGAPILNLTTGNKQLTYTWTASNPAADSYDVYWVVGSGQTAAQVKNGTKITNAASGGTITGLNSDVAYSVLVTAIKAGYTSIDSTVVTEKTTAPPTWAKTASAGIFPSRFFAVAADSSGNVYAAGLQSGTGAYTYGAGVSAQGTSSGSNVVLVKYNANGTALWARTVSAGSNHSDFRAVAADSSGNVYAAGWQDGTGAYT

SEQ ID NO: 105885 - protein, 161 aa, Unknown
  Obtained from environmental sample
  misc_feature (1)..(161): Xaa is any amino acid
MKIKFKMSIVVIAIMAVVVAGIATLLLWQASKNTLQLSLRSQEHLTSSRAEFWKGREDGYIRALTTLANVMGDFETVKPEERRDRYDAMLKSALVEEPQMAVLYTVWKPDALDGMDAQYIGRTGSGPTGQYATAWGKDTGSIEKRITTDFGNTMEYITGPN

SEQ ID NO: 105886 - protein, 276 aa, Unknown
  Obtained from environmental sample
  misc_feature (1)..(276): Xaa is any amino acid
RDLFFRLNWATLHHFTKFALIASLILAAGAVALWRGPDSLPGGLALLLAALCIGPLLAVYGQTYQSGADAWELCRAWTLAALPLALAGRQSALWLTVWLTGSAWALQYLAGLPGWFDVPPGMPEFFLGQMAILAGWEAAAHLRKNTPGHSWLAAPWFPRAIACVTLSALTALLVWRIFHTTDGYDGVNLFLPNATLSFAAPYALLLLGGLAWYRKRRPDLFMCSMGLFSLATLVYCLLVKALDAGWDVSGLLLFHGLLIAGLCAGCMRLLRRLPRA

SEQ ID NO: 105887 - protein, 199 aa, Unknown
  Obtained from environmental sample
  misc_feature (1)..(199): Xaa is any amino acid
MRRLLVAASLVLFLAGFAWSVLAKEALIAHGDRLIVRLAPVDPRAFLLGDYMALDYAMNRELKKALLKRHGGNDPRRDGEERATRPGARLDAERDGVAIVRLDADTTAFFVRVDDGTALRENERRLCFRIRKGGVQIAPARFYFQEGLAEDFARAEYGELRVDAQGNSLLVHLLDGDLRRLPLPPMPEENAPAGPEAPA

SEQ ID NO: 105888 - protein, 97 aa, Unknown
  Obtained from environmental sample
  misc_feature (1)..(97): Xaa is any amino acid
MTIGQSDGCGTEVLDGRDQAAISKAAGILKSGGLVAFPTETVYGLGADGLCQSAVEKIYEAKGRPKNNPLILHIADVEAARPLVADWPRMAQKLADK

SEQ ID NO: 105889 - protein, 277 aa, Unknown
  Obtained from environmental sample
  DOMAIN (122)...(254): PAP2 superfamily
  misc_feature (1)..(277): Xaa is any amino acid
YLCTENAEENNAEEINVEENILKEKNDVSRPSLKLVFHELGWNVLHTFTCNYGLNFIGAGLGTWAFIETDIDWKWRNIAYNNTWLSDSGRPGLYIGYVVPAITPVFTYTLGWFKNDDKLQITGMALLQTLMIMLAVQTPLKMVTGRALPGIVTELDHTRSLRTDNFSGEFDWFNKNPIGGWPSAHTANAFAAAATISQIYSENLWLKIGVYSYAAIIGFGVTVNVHCASEALAGALIGYAVGSTVGKSFKKLTEDKSNKDSDDNNVSFYFLSNSIGM

SEQ ID NO: 105890 - protein, 270 aa, Unknown
  Obtained from environmental sample
  DOMAIN (14)...(270): Bacterial extracellular solute-binding protein, family 7
  misc_feature (1)..(270): Xaa is any amino acid
FGSASAFAAVELKLAHSSPATVEDKLEYACQKFKAFVEEHSKGAIKVTTYPANQLGQEREALEGTQMGTIELCALSTGPIPGLFPEIMLLDLPYMFPDREAAYALLDGPYGDKLRNDMVKKSGVRILAYGENGFRCFTGVRPLQRPADFKGIKFRLMENPMHQAMVKAMGAIPATIPFGELYTALAQGVVDGQENPLSLITSMRFYEVQKHLTLDNHVYNPHILMMNNDVYMKLSPELRKVLDEGAKVFKDEEREFNQKQSAAGLQMMRD

SEQ ID NO: 105891 - protein, 249 aa, Unknown
  Obtained from environmental sample
  misc_feature (1)..(249): Xaa is any amino acid
MFPNHQYLFEYDSQEEVWKALKLDDEIELIFACTRRLLTYTNFYEEAGYKLNLILDYTFDSSLGYNKDAIILKSIVDKALGIINVNNIKNQWMHKTYDYRAKLTEAQRPWFIGAAVMFFLVLLLVLTLLIRSRNAGRYLEKLVAQRTGDLEFQTSKLQSVIASIPDLMYTKDKDLRYTQCNKLFEDFLGVREADILGKTDMESEFLHPEHVETIQGIEQAVINENKICAIEEKVIRLYPEGAIFETVKA

SEQ ID NO: 105892 - protein, 144 aa, Unknown
  Obtained from environmental sample
  DOMAIN (1)...(144): Flagellar basal body-associated protein FliL
  misc_feature (1)..(144): Xaa is any amino acid
IAVFFVGKLKEPDAAAISAEVAAKARQDSINNQTAMGATMAAPIEITVNISGEDGRYLKCGIQLEYDGTDEQLGTELEARKARIKDIVIDIMSSKVLSDLMSNDGKKAIREQIVAAVNNILPEDVGGKPLGKVRRSYFDSFVMQ

SEQ ID NO: 105893 - protein, 293 aa, Unknown
  Obtained from environmental sample
  DOMAIN (237)...(293): Surface presentation of antigens (SPOA) protein
  misc_feature (1)..(293): Xaa is any amino acid
SRGSKTLFKVLCEQASSVVTTVLSRAVIFQLQWLFAGENSVIPDELTSQSLYISVDVKKTVVGKMFFAISKSEVATLSDLMLMGSGHSDYTEEHKDAICEIINQITGSCITVMDSQLHLALDFGQASVSEFSGKNEFKGGAVATVLVKIEEFPDRKILIVLEDGLFSGLRSKMSSKISYASTDTSLASLGLSSSPTPAAPAAVGGGVPSGGGAPVTAPPLLAPQHSGGPFGSTGNKALDLLMDIELPIVIELGRTQMSLKRILELGPGAIVEMDRLAGEPVDILINGKVVARG

SEQ ID NO: 105894 - protein, 269 aa, Unknown
  Obtained from environmental sample
  misc_feature (1)..(269): Xaa is any amino acid
MMSDGALSQDEIDALLSGVDSSSLGGFGGGGSSPAAAAVASPASAGGSFDIDALEKFFSSTTGALSANLAALTGTTVSLVGPEVASSSRDNLLTLIPGMVTVVNTNFTSGFPGEHCFIFSEESAKAIASLMTKETDIQLDEMAMSVIGEVVSQIAGTQITALTDKTGNKSIASASPSAANIPKATAALPAGEFAVMTYGLEMGDGLSHQIWEVLGLSPAVDISNSLSGKSPAKSSGQQMPMGMGGNDMNAGMQMPMGMGGMNMGGYANA

SEQ ID NO: 105895 - protein, 54 aa, Unknown
  Obtained from environmental sample
  DOMAIN (2)...(25): 4Fe-4S binding domain
  misc_feature (1)..(54): Xaa is any amino acid
MAHKISDACLACGSCVPECPSGAIQEGEPYTIDPGKCTDCGACAETCPAEAISA

SEQ ID NO: 105896 - protein, 274 aa, Unknown
  Obtained from environmental sample
  DOMAIN (1)...(111): Response regulator receiver domain
  misc_feature (1)..(274): Xaa is any amino acid
MEDSDIFAEMLISSFDQSKYNIQRAVNGFEGIKKVYGFMPNLIISDVEMPLFKGYQVTRFLKSRKNTKNIPVIMFTSLDETKDKFWGLQTGADYYIEKSPENINMMINLIDKIFSTPQEIDFDAIEKESRKINDDSIIEIVNNLLDNKLFQTTIIGLLSDLSKKVNSIEMTAQGVMELLHTVCEAEIVTLIIRGSNGFVYIYTDNFSAYSKEIYDNFLGVCTSDFNILFQGSKIISNKIKNFRPTGQNKKNISSYIYIPLSSRGENFRSLHIAN

SEQ ID NO: 105897 - protein, 159 aa, Unknown
  Obtained from environmental sample
  DOMAIN (24)...(159): Aminotransferase class-III
  misc_feature (1)..(159): Xaa is any amino acid
MSNREIIDLAQKHLMRNVGRYDLAFVRGRGLKLWDADGREYLDFLGGIAVCALGHAPPAVTRVLSGQADRLIHVSNYFYNEPMARLAAMLAESSGLERVFFGNSGAEANEAALKLARKYAFDRYGPGRHGFVTAQGSFHGRTLGTISATGQDKVKAGLS

SEQ ID NO: 105898 - protein, 216 aa, Unknown
  Obtained from environmental sample
  DOMAIN (28)...(168): Histidine kinase-, DNA gyrase B-, and HSP90-like ATPase
  misc_feature (1)..(216): Xaa is any amino acid
MALHTTNINTHDIQVLPPQEARRIAAGEVIDRPAALIREFIDNAIDAGASAIEVSIEGGGGKKAEVSDNGSGMDRENLEKCVLPHATSKIRSLDDLDTVETLGFRGEALAAAAAVARLEIISGTENGGATCGGEAWRLEAGPGEERPLHITTASRTRGSTVRALNLYESIPARKKFLKRDGSEAAQCRQAFIDKALAFPEITFRYTQDGRPKDFLP

SEQ ID NO: 105899 - protein, 260 aa, Unknown
  Obtained from environmental sample
  DOMAIN (69)...(255): Phosphoribulokinase / Uridine kinase family
  misc_feature (1)..(260): Xaa is any amino acid
MSPNFHVYNEYKKWGRIVGVRVVGDLNSLIAKRNIRDYIRIAEAHQARKMSEIAEQICGQEETVKTVLLAGPSSSGKTTSAKKLSIELLVLGIMPIAISLDNYYVGTDRTPKDEKGEPDYECLEAMDIPLLNDHLLALYRGVEVTMPVYDFKTGTRLNYGGKKARMDENRRTVLIVEGIHALNDKLTPDIPRETKFKVYVSALTQLNLDDHNRIPTSDNRLLRRMVRDSQFRGKDAAGTIKMWSGVQTGERKHIFPYQNT

SEQ ID NO: 105900 - protein, 265 aa, Unknown
  Obtained from environmental sample
  DOMAIN (136)...(265): Alanine racemase, N-terminal domain
  misc_feature (1)..(265): Xaa is any amino acid
SPDSARAALEVLANYRSSGKKIAVLGEIFELGNFSAQEHINLAKTCNEKNIDYVFFIGMDYECFKKELKKGESFSDRERDAFSKSMKNYIAGGNLSKGDVILIKGSRGMRMEEFYEPLKSYINAVMSDSTHLPPSATKLYVDINAVKFNYSQIKKEVGSHVEIMPMVKANAYGCGTDIIANVFRHSKYLAVADIKEAALIRRILPEADIVIIYQPYAGDIEEIVSGCYTVSVSNPDFAKKLNEEAGRHNKKIKIHIEVDTGAGRL

SEQ ID NO: 105901 - protein, 250 aa, Unknown
  Obtained from environmental sample
  misc_feature (1)..(250): Xaa is any amino acid
MRTNAFTKKDIQKLRDESTFAAAVSGVVNSNANVTASEGSAQVQIMGVEPDFSIARNYKINAGVFFDDEDMRLRNRVAVLGRTTAKNLFGDADSALSKQIRIGTVYFTVIGLLESKGAGLGGNDQDDIVIVPMDTAMTRLNNSRNINMIVLSVISKEYMDAALKEARLILCESRGIADEANADFDIMNQADIIDMASATSKTMTTLLAAIAGVSLLVGGIGIMNIMLVSVTERTREIGIRMAVGGRKRGH

SEQ ID NO: 105902 - protein, 94 aa, Unknown
  Obtained from environmental sample
  DOMAIN (18)...(93): Prokaryotic transcription elongation factor, GreA/GreB, C-terminal domain
  misc_feature (1)..(94): Xaa is any amino acid
IHFLEDRVPRAVIIEHDTAGAARILFGATVKVRDLSLGKEYEYTLVSPEGSDPVNGKISSVSPIGKALIGKTRGDKVEVQTPKKVIKLEILDYK

SEQ ID NO: 105903 - protein, 260 aa, Unknown
  Obtained from environmental sample
  misc_feature (1)..(260): Xaa is any amino acid
VASGLILLTLQALAAPASSVDKQLKSNAAALKKNQEEIQKAETKVRELENKESGVLKTIAEIDQGLTQTREQLYVLQKKESSLRTAIKEIEEEITHLQESIDTQKKAIATRLRDLYIHGKREEWELLFNLLKENENPERKLYWVQRLLESDRITIENYLASIEKQREKREQLGTKQKEMAELHENKSKEESKYQNQLLFQTEVLTKVKKDKTTQHRVIEEYKQNQQTLTALIATLEKKRQAELKRQAELKSKSQSQSPTA

SEQ ID NO: 105904 - protein, 60 aa, Unknown
  Obtained from environmental sample
  misc_feature (1)..(60): Xaa is any amino acid
KEKYTLLGPWESDPDNNVISYLAPFGKIMMGKTEGEQFSFTSDGEKISYKVENIRPAVIN

SEQ ID NO: 105905 - protein, 239 aa, Unknown
  Obtained from environmental sample
  DOMAIN (1)...(145): rod shape-determining protein MreC
  misc_feature (1)..(239): Xaa is any amino acid
DPYSDQVVIDKGSVNGVYEGQPVISDKGVVGQVVAVAKLTSRVLLICDATHALPIQVLRNDIRVIAAGNGCTDDLQLEHLPANTDIRVGDVLVTSGLGGRFPEGYPVAVVSSVKLDTQRAYTVIQARPTAGLQRLRYLLLLWGADRNGANPMTPEEVHRVANERLMQMMPQVLPSPDAMGPKLPEPATGIAQPTPQQPATGNAATAPAAPTQPAANRSPQRATPPQSGAQPPARAPGGQ

SEQ ID NO: 105906 - protein, 265 aa, Unknown
  Obtained from environmental sample
  misc_feature (1)..(265): Xaa is any amino acid
MPHTECVAGEEQKQFTVRDISELVRQGQDLMVQVVKDPLGTKGARLTTDITLPSRYLVFMPGASHVGVSQRIESESERERLKKVVAEYCDEQGGFIIRTAAEGVGEAELASDAAYLKRVWTKVMERKKRPQTRYQLYGELALAQRVLRDFADAELDRIRVDSRLTYEALLEFTSEYIPEMTSKLEHYTGRQPIFDLFDVENEIQRALERKVELKSGGYLIIDQTEAMTTVDINTGAFVGHRNLDDTIFNTNIEATQAIARQLRLR

SEQ ID NO: 105907 - protein, 267 aa, Unknown
  Obtained from environmental sample
  misc_feature (1)..(267): Xaa is any amino acid
GHPVLDKWISITSQGGCVRSREKDYTEEEAAFTHTYGIKSLFIVPIFTHGEFWGNVSFQDHSKDRYFDKDCADLLHSAACVFSNAIIREEVALGAQEAIKTLKRREKMLDTLNRVAVMFLSRNEKTFEETMTRGVREIADMFDLDRLSLWRNLRRHDAMHVSQIYRWDREAGGTTEPTKGLEDVTYAQLAPRWEKLFASGQSINSPVRLLPEAVMLQSFGCVSAFITPIYINNAVWGFALLEDRHSERFFEEDSIEMMRSGVLLCAN

SEQ ID NO: 105908 - protein, 236 aa, Unknown
  Obtained from environmental sample
  DOMAIN (1)...(68): Thiamine pyrophosphate enzyme, N-terminal TPP binding domain
  misc_feature (1)..(236): Xaa is any amino acid
VLGTDAFQESDISGMSFAAVKHSYLVKNSGDLPRIVKEAFYIAHSGRQGPVLIDLPKDISAGACATNFVDSLDLPGYKIPSRAEEDHIEQAVITIKKSKKPLILAGHGAAMSGASRAVKELAEKLGAPVSSTLLGLGTFPASHELSLGMTGMHGTVAANKAIHECDLLISIGARFDDRITAKLSEFAKQCDVIHIDIDKAEYGKIITPRHFLHGDAKNVLEPVIAFGGKTGFADGE

SEQ ID NO: 105909 - protein, 262 aa, Unknown
  Obtained from environmental sample
  misc_feature (1)..(262): Xaa is any amino acid
MKAIIDNGGDAVKAVVVWGVRDDQSWRNSQYPLLFTGSGETITKKPAYDTLAKLIPQSEWGDGSNPGTPSGNFKLNVKASSLEGGTVTKTPDNASYPSGTSVNVSATAKEGWAFVGWSGDITGTEASLSVTVDKNKTATALFLPTSDGTTNIVKDGNFSGTSLSDSWKWNTGEYYGNSQGNSSISGGKVTLNITNAGTDSYMPQLIQQGLALEKDMKYRLTFTASAGAARSLEVGFQQSADPWNTYKDSVFQLTTAEQEYVL

SEQ ID NO: 105910 - protein, 275 aa, Unknown
  Obtained from environmental sample
  DOMAIN (1)...(275): Phosphoenolpyruvate carboxykinase
  misc_feature (1)..(275): Xaa is any amino acid
MYVIPFSMGPVGSNIAKIGVQITDSPYVVVNMHIMTRVGTKVLDILGGDGFYVPCFHSVGKPLAPGEADNGKWPCAPLEHKYISHFPETREIWSYGSGYGGNALLGKKCLALRIASVLARDEGWLAEHMLILKITNPKGEFKYVTGAFPSMCGKTNLAMLIPALPGWKAETIGDDIAWMKFGEDGRLYAINPEAGFFGVAPGTNNESNFNAMESIKQNTIFTNCGLTEDGDVWWEQIGHGAPGKEIIDWKGQAKPAPQTDKSPKGEEIAHPNARF

SEQ ID NO: 105911 - protein, 258 aa, Unknown
  Obtained from environmental sample
  misc_feature (1)..(258): Xaa is any amino acid
VFVKNFRYFLVLFLCFIANAWATDIPFHGLPVIQVNTENRAGIRDKINYVPMQFVLTDKDNPSNNIFLTDKDFSDGGIRRRGNTTFGYPKTPFKIKFNKKQRLFGLEKAKSWILLANYFDLTLIKNTLAFELGHRLNLPYTPSYHHIDLYLNGEYIGNYMITEHKEVAPGRVDIDPTKGWFVEMDIYYDEEPKFRTTKYNLPVMIKSPDFGTNSANPMYYFVKNDLNKLCDSMASVNFPENGYRDLIDMKSIINYFLV

SEQ ID NO: 105912 - protein, 83 aa, Unknown
  Obtained from environmental sample
  misc_feature (1)..(83): Xaa is any amino acid
MELDEGAVFGEMEVVDIQPAEASVKALVATSVMTLSIDALGEIYETDLKTYSFILMNLARDISRRLRRMDSLAAKESPHMEWN

SEQ ID NO: 105913 - protein, 215 aa, Unknown
  Obtained from environmental sample
  misc_feature (1)..(215): Xaa is any amino acid
LPIQDRAQKGMPLQELSLHYMKTVDLMEPWYSRFLPSAYIAVVVPIIILFAMFFIDKITFIILFFTGLLLPLFLFLIGKIAKQKSEEQWQSFSRLRAFFLESLQGYKTIKIFKKVKERERDLEIAENEFSKKTLAVLKTAFLSALVQEWAGSLSIALVAVGLALRLMNGSTEFSTAFLALLLTPEFYRPIRQFGTAFHTAINAKTAWSHATHPVS

SEQ ID NO: 105914 - protein, 128 aa, Unknown
  Obtained from environmental sample
  DOMAIN (4)...(124): PIN domain
  misc_feature (1)..(128): Xaa is any amino acid
MGRYLLDTHTAIWYFNGDNALSKTAKETILPLSNQIYLSIISAWEIAIKLSIGKLDIDGSTADFINDAESSGFIFLPIKPSHLTVLESLPMIHRDPFDRLLIATALDEQMSFISADKNIAQYDVPLIW

SEQ ID NO: 105915 - protein, 168 aa, Unknown
  Obtained from environmental sample
  DOMAIN (2)...(168): haloacid dehalogenase-like hydrolase
  misc_feature (1)..(168): Xaa is any amino acid
MITHLLFDLDNTLYSSRYGLEAGVSQRINDYLVESIGMRRDEVEKIRFQLIQDNTYGTTLEWLMREKGFTDIEDYFSAIHPEDEAESLPPDPELGNFLASIPLPKAILTNSCMKHTERVLDKLGIRRHFCCVFDIRFNNYKGKPRPDAFLRSLDIMNAEPARTLFIDD

SEQ ID NO: 105916 - protein, 99 aa, Unknown
  Obtained from environmental sample
  DOMAIN (1)...(74): ParB-like nuclease domain
  misc_feature (1)..(99): Xaa is any amino acid
MRFDEAALDSLASSLKQHGMVQPIVVRRVGERFEIIAGERRWRAAKQIGFPTVPVIVKEIPDDRLLEFAIVENIQRQELNPIEEAQAYFQLGELLRLTQ

SEQ ID NO: 105917 - protein, 266 aa, Unknown
  Obtained from environmental sample
  misc_feature (1)..(266): Xaa is any amino acid
SSVDVAIVEVGLGGRWDSTNALDPILTILTNVDFDHTAHLGNTLEAIAREKLCTARDGRPVLLGPGLDPGWLTQLCECKPVMVPSKTPDADIFWGHSMIGGYQINLAGEHQIRNLATAIAAVDALRGLGWVLDPDAIFSGFSKATWPGRLWQVPELTRVTFDGAHNAQGTQALASHMVKFGVRAHIIFCAMSDKDIASMARTLAATEPLSVAVAQIGETWDAKFSRCSTADAMQRAWQDAGYGNPQVLTLDAIVAKLSQNNTDTII

SEQ ID NO: 105918 - protein, 232 aa, Unknown
  Obtained from environmental sample
  DOMAIN (1)...(230): Iron only hydrogenase large subunit, C-terminal domain
  misc_feature (1)..(232): Xaa is any amino acid
MIAIVAPAAASVFDEQYLNLNGWLKSVGVNAFFDVSFGAELTVVSYLDHIKKNNPRTVIAQPCPAIVTFIQIYHPELLPYLAPADSPMLHTAKLVREYYPEYKDHKIVIISPCIAKRREFDETNIGDYNVTMLALKNYFQEHNIDLSSFPEIEYLGPHAERAVGFSTPGGLMDTAERFVPGIRRKTHKTEGVHTIYPYLREISKLLGNKDVEFPLLIDCLNCEKGCNGGPGT

SEQ ID NO: 105919 - protein, 254 aa, Unknown
  Obtained from environmental sample
  misc_feature (1)..(254): Xaa is any amino acid
LFVDDTSSIDAATFRYRVTNYSNAGGDVPASSSWEPGSLEAGELRSKNWNISLSDDLADGPYWLDIEVKDAHGNTYNNERIVFILDKNDPSVNIVSVNDTPITPSLSNIFNAAFTLAGTASDGNPGNLKNVVIRVGDDPNNTAVTILPSGLTGSNTPHDAWEWTIDSQDFENDGQNTVTVTATDLSGKSKFKQYPFIRDTEGPKITPSNITATNNPNNATPLMDLNAAITGTFSDTWSRIGKAQDKFGGSIDLY

SEQ ID NO: 105920 - protein, 207 aa, Unknown
  Obtained from environmental sample
  DOMAIN (33)...(207): Aminodeoxychorismate lyase
  misc_feature (1)..(207): Xaa is any amino acid
MKKLFSIGLLLGVVALFLFLAHAMLVPQNSAARIVVIEPGARLSSIADTLVKEGALGHPELFKAWAYFTRRQNSLRAGEYEIPARATSHEILAMLSDGIGRNRLATIPEGLTAKQAQALLMTFEELTGDMPDIKDGEILPQTYAYIRGQTRAALVARMKSAMESALEHEWNNRAPGLPLATPQEALVLASIIEKETSLDAERPLVAA

SEQ ID NO: 105921 - protein, 252 aa, Unknown
  Obtained from environmental sample
  misc_feature (1)..(252): Xaa is any amino acid
TAEDAAEREAERQKEAEQRQKDAAEREAERQKEAAEREAERQKEAAEREAERQKEAAEREAERQKEAEQRQKEAEEAEKRYTEWKAGWQVVKDEHEKTERVVRAVSWQMGGLHNSFGEMAEFMVAPGVADMFNDIGFHITEEPICNRKIRDEKKRTLTEIDLLMGNGDYVIAVEVKTSLGEKDIEEHRKRLEILHKHISKTGDRRKILGGMAVAVLNDDGRKAILDAGFYLIVPSGDYMKLDLPEGFVPSEW

SEQ ID NO: 105922 - protein, 163 aa, Unknown
  Obtained from environmental sample
  misc_feature (1)..(163): Xaa is any amino acid
MHCSPVYEFHDINAENFANIEGVLKESATDKKWNLMIVPFNEGVQPSVLKAFSQQLLEWKREGHSLYLHGYRHEADQILKRSLLGRLALSLTNRESEFAGLSKEDSEMLLNKALQEWQKLNAGEPQGFVPPAWYGSKMLFYLCKNLGFENYNSRFTLWNKSKG

SEQ ID NO: 105923 - protein, 270 aa, Unknown
  Obtained from environmental sample
  DOMAIN (83)...(211): MgtE intracellular domain
  misc_feature (1)..(270): Xaa is any amino acid
MSDTIDADNADNTADDPAADETRAIDAAALAAAVTAVPSASAPSDPAPDDFSPAPGPVNDGGVKTIDAIDTVEPDVVDEDEEPDPFPELTTLVEGKRWIELRRELSSMPPPEVADFVSRLSGTERTLVVRFLPRYCAADVFSELPPAIQDEVLTNLTNTEIRNLLSDLDPDDRTALMDEMPASMTRKLLNLLSPQDLKLTRELLGYPDGSVGRIMTPNIVYIKERWTVREALEHIRTFGRDSETINVVYITNSTGRLIDDITLSKLIMTD

SEQ ID NO: 105924 - protein, 200 aa, Unknown
  Obtained from environmental sample
  misc_feature (1)..(200): Xaa is any amino acid
MADTNVNKKPLPVSESFFDLMIEDGYYYVDKTLLIKEMLDKKSRVVLCTRPRRFGKTLNQTMLKCFFEDTTRIGGKDTRALFRGLKIEDAGERYMEYQGKYPVIFLSFKDTKFDCFDGAYDKLKEYIANEFERHAYVMEKIPNDSGRERFKRLSSGAGSIGDYSTSLRFLSECLENYHGKKTVILIDEYDVPLENSWYRG

SEQ ID NO: 105925 - protein, 92 aa, Unknown
  Obtained from environmental sample
  misc_feature (1)..(92): Xaa is any amino acid
VAISIIYVLTALVWILFGFMRRFVFIRRFGLALAIFAVVKLFLLDLSGLTQGYRIVSYFALGIILIAISFVYQYFSKRLELKEGMSIHAEKN

SEQ ID NO: 105926 - protein, 279 aa, Unknown
  Obtained from environmental sample
  DOMAIN (16)...(279): Nitrogenase component 1 type Oxidoreductase
  misc_feature (1)..(279): Xaa is any amino acid
ARAARTAGLLREGERVGAVSQRACVYCGARVVLNPITDAYHIVHGPIGCASYTWDIRGSLTSGAETYRNSFSTDLRETDIVFGGEKKLTAAIDELMEKASPAPKLIFVFATCIVGVIGDDIDAVCRAAETKYGIRVIPVKAPGFSGTKTHGYRLACDAIMTLVGPHFGTPKRFGVNILGDYNLAGEMWIIKNYLEEIGVPVISTITGDSSYETLIKAPSATLNIVQCAGSSAYLAERMEAELGIPYIKVSFFGVEDTTASLLRAADALGRPDISANARA

SEQ ID NO: 105927 - protein, 133 aa, Unknown
  Obtained from environmental sample
  misc_feature (1)..(133): Xaa is any amino acid
MVYFLSLKRRFIVPLADIDDYNKFQYKTSLYTLLWENTENLDYPRHWHSAMELIMPIKGKYEIQLRNKTYLLKENDILIIPPLDIHGITVPPDSKNGLRIILMVEPTILFSLPGISDFILKPVQFLPYTQDEM

SEQ ID NO: 105928 - protein, 260 aa, Unknown
  Obtained from environmental sample
  DOMAIN (73)...(255): Domain of unknown function (DUF323)
  misc_feature (1)..(260): Xaa is any amino acid
ISRTGVFVKSVTAKTVTVTAKSGASEGKVTVKYNGSSTAPSAIGEYTVTFDVEAAGKFKGVTGLSAGTLFIIKPVEMVNMPSGSFQMGRELGTSGADITPVRTVTLTGFKIGKYEVTQEQYHDVMRSNPSIFSLNPANGEMQGNRPVENVSWYDAIVFCNMLSIAEDLSPAYSISGKTNPSDWGTVPTSSNKTWDAVVIVSGSNGYRLPTEAQWEYAAKGGDGTPGNYMYSGSDTLGDVAWYSNNSDSKTHEVGKKKPNS

SEQ ID NO: 105929 - protein, 127 aa, Unknown
  Obtained from environmental sample
  misc_feature (1)..(127): Xaa is any amino acid
AAAAYQRTQCRYDLNRVPEELRTEAVCLAAVQQDGSLLRFVPNAARTEAVCFAAVQQDGWALEHVPEALKTEALYLTAVQQDGGALKFVPDAQKSETLCIEAVKQNMNAMMYVPEDKKDTVKAAKKE

SEQ ID NO: 105930 - protein, 203 aa, Unknown
  Obtained from environmental sample
  DOMAIN (35)...(201): Metallo-beta-lactamase superfamily
  misc_feature (1)..(203): Xaa is any amino acid
MRCIKKVTDDLVWVGANDRRLALFEGVYSVPSGVSYNSYLLLDEKTVLFDTVDRAVQQRFLENTAEALGGRDLDYLIVQHMEPDHSAAMQALLARHPGAKLVCNAKTAALIGQFYDIDLSGRLMDVTEDSVLSTGRHALHFVMAPMVHWPEVMVTYDETDNILFSADAFGCFGALNGALFADEVDFNRGLYGRGPAILRQHRG

SEQ ID NO: 105931 - protein, 212 aa, Unknown
  Obtained from environmental sample
  DOMAIN (40)...(126): Hpt domain
  misc_feature (1)..(212): Xaa is any amino acid
SNNTGGSALADPAGVGLAIPGIDIQKGIAMTGGTLSAYKQVLSLFRKDAQDRLPLLQKAPEADLPAFVTQVHALKSASASLGAGAVSAQAAGLETAGKAADMAFIRENLPVFARQLAELVQNIEKALETKESDNPSESSFRAAHSPLFKELAEALEAQKSADIDRLLDELSQKPLDKQTREALEKISDEVLMTEFGNALKIIKEINDDNFNQ

SEQ ID NO: 105932 - protein, 251 aa, Unknown
  Obtained from environmental sample
  misc_feature (1)..(251): Xaa is any amino acid
ITITGNIFGISRENSPESVTGVFFSWDYESGAFNPYAVREPEFIEVSETEMGYEHWSAREIKVRLPDGAVSGNLEVRTPHGKSRSFFFDVSGKPGFKNIRDKRGYTITYSVDIRVTDASRPNMLYLWIPKPVNSPSQRNVTLISRSIEPFMENYKGVSLYKLDNLIAGTSQSINLSYRVEVYSVGSVIRPLSIKQEATELSAAHTKSSSLIPSDVPQIKTAANLIVNREQNPYIKAKAIYDWIINNMQISD

SEQ ID NO: 105933 - protein, 223 aa, Unknown
  Obtained from environmental sample
  misc_feature (1)..(223): Xaa is any amino acid
MANEVLNAALKYLANWYEQGNIEEIAIDTPGRVWLRLRGRREAPWVEEKDDNLSHSYLYDVMNIIANTYEVPFDPLEGTPVVYATLPGDHRFSGIAGKNVLYEVEDFEGGIALNIRAKKDTVDFDFKDYGLIKGKELAVLKSKDKVYSGKPWERLMEYIADGSHILISGATSTGKTTFLNNILKLLSPNLRIITIEDSRELIVPQKNRVHILLSRTQQLNKFT

SEQ ID NO: 105934 - protein, 73 aa, Unknown
  Obtained from environmental sample
  DOMAIN (1)...(72): Clp protease
  misc_feature (1)..(73): Xaa is any amino acid
IHQPSGGFKGQATDIEIHAKEILATRARLNAIYAQHTGKSLTEVEDAMERDNFMTPDEALAFGLVDKIVSKRV

SEQ ID NO: 105935 - protein, 269 aa, Unknown
  Obtained from environmental sample
  DOMAIN (1)...(263): Bacterial extracellular solute-binding protein
  misc_feature (1)..(269): Xaa is any amino acid
ILEAYGDDFDTKIAASMGSNDAPDVMYMWNYAVYYGGLENLDPYIAKEGTAFKGDYYEALWPYNSMDGVIYGMPVGYTTHALFYNKDMFDKAGIRYPTENWTFDDVYAASKAITEYYKDSVTKGYVYPISYDPYDFEMYLWSNGTAFAGSNGSTRGYLDSPESIRVFSAFQKIAADGYAIPAENYGTSAMTSQNAAMYVNGSWPIARLIEAGINFGVAPIPRWGSKPSVSILSSSGLAMSKSSKNKDAAWEFIKFWTSEEANIYRIEYE

SEQ ID NO: 105936 - protein, 269 aa, Unknown
  Obtained from environmental sample
  DOMAIN (2)...(262): Pyridoxal-phosphate dependent enzyme
  misc_feature (1)..(269): Xaa is any amino acid
VGKYFPTGCHKVGASFGCLVPRLVTGQFDATAQKAVWPSTGNYCRGGAFNSKLLAVDSVAILPKGMSRERFDWLKTIATEIIATPGTESNVKEIFDKVNELKATRKDVMIFNQFDELGNYLWHYSVTGPAIAEVFGNMAQSDKGLDFSGACFTSGSAGTLASGDFLKQRYTASRLAVGEALQCPTILNNGFGSHRIEGIGDKHIPWVHNVKNTDMAIAIDDNDCMALLRLFNEETGKAFLVSEAGLSREQADNLALMGISGICNMLCCI

SEQ ID NO: 105937 - protein, 187 aa, Unknown
  Obtained from environmental sample
  misc_feature (1)..(187): Xaa is any amino acid
MISLETAEKALKNIYLGVVTDQLNLKTNPFITKIEQTSEGVFGKEIIKLASVGINGGIGAGTETGSLPSASGNNYVQLRSELKNLYGNIEISDKALRASEGGNAGAFVNLLNAEIDGLLKASKFNFARMVFGDGSSRLASATVCDASTKRFVTVTTVNYMQVGMLVDVYDNEEGRFTSLANRIVSVD

SEQ ID NO: 105938 - protein, 118 aa, Unknown
  Obtained from environmental sample
  misc_feature (1)..(118): Xaa is any amino acid
MNLIVLDTNVIVSALWNRNGNPATLLKMFFENEIVLFYDEEIFNEYNRVLRRSKFKFLEPEINDLLYFIEANGISISNTEKSVEFMIDESDRKFYDVARKCKAFLITGNKKHFPNESF

SEQ ID NO: 105939 - protein, 281 aa, Unknown
  Obtained from environmental sample
  DOMAIN (5)...(280): Iron-containing alcohol dehydrogenase
  misc_feature (1)..(281): Xaa is any amino acid
SGDHFQTGGITGIGKLCEERGFERGVLVCDPLFEQNGLAKTICGFAGERLAAVYSGVTPNPRVEEADAAAGVMRDTGADFAVALGGGSSIDCAKAAVAIVKGKKSAAAYHTRGEPLPDCALPLIAIPTTAGSGSEVTGVTVLTDTEKNIKSPMAHKNMYPRIALVDAALTLSLPPAVTASTGLDALSHALEGFWSIGHQPVCDALALSAARLIFEYLPCAYKDGADISAREKLSEAAVLAGLAFALPKTAAAHAISFPLTNIYRLPHGEACAFTLDSLCII

SEQ ID NO: 105940 - protein, 270 aa, Unknown
  Obtained from environmental sample
  misc_feature (1)..(270): Xaa is any amino acid
APSTGAYFAAINITNGAVDVGLTWDQADDAGVTRTYFSGNDPSSTLADDLEDDEDAYTDNYLGLGAKLTSEGYALAVYSAGQTTKTVIIGDRGRITLNGSDAKYGGIKVSGKTTVDFSGTATVEKDGSKVFIIDAAQGKVTVSGGRIRSDAGNAVTTNGGEIAVTGGIITGKAGILLYAKQDSASGTKAKHAGYVTVDGSADKSTAGNIASLGIDNLDINTAETFIYNTYGTAIKAEDTVSVQSGGMCGSGLNAHPCVVVVGTSSDTAIA

SEQ ID NO: 105941 - protein, 227 aa, Unknown
  Obtained from environmental sample
  DOMAIN (95)...(226): Alanine racemase, C-terminal domain
  misc_feature (1)..(227): Xaa is any amino acid
ANRLKPPEYAGTATHLAVSDSAAPEDRAYTERQIARFREALERIRGAGVDPGIVHAANSGAVLQHPEAWFDMVRPGIILYGYNLTGTPFPGLKPVMELRTNVALIKRVKKGESVSYGRLWTCPADTTIAVLPVGYADGLPRLAGNKWQVVIKGKTYPLVGRICMDQCMADLGPDTVSPEGREVRRWDEASIFGGPAPDAAVLAERIGTIPYEITCNINKRVPRVMGN

SEQ ID NO: 105942 - protein, 156 aa, Unknown
  Obtained from environmental sample
  misc_feature (1)..(156): Xaa is any amino acid
LVKTPRIVVRDDNTPDAKNFRSKLYHIYADNDVKDNINQSAKPEIPLPDFVIQAYNLLGADWLETYTAWKKDGSDVPPVMITVANRTETAARIEYAFRTKQILTEELCDPEYMRQIDSKKLEQADADNISIDDITSDSEETGWKKKMCLKKIKPPY

SEQ ID NO: 105943 - protein, 50 aa, Unknown
  Obtained from environmental sample
  misc_feature (1)..(50): Xaa is any amino acid
DRQAQEYRNLAKAIEENTLFTIPKPMTQERLEEILMEYGLMDAIKNDYRI

SEQ ID NO: 105944 - protein, 135 aa, Unknown
  Obtained from environmental sample
  DOMAIN (5)...(135): DeoC/LacD family aldolase
  misc_feature (1)..(135): Xaa is any amino acid
LLDSEILSRVDHTLLKMTASWAEIKTLCDEAVRYKTASVCIPPAYVKPVFNEYGNSLVICTVTGFPLGYTYTSVKANETGIALENGAGEIDMVINVGDVKNGNYDLVLDEIKSIKKVCGKKILKVIIETCYLGEE

SEQ ID NO: 105945 - protein, 248 aa, Unknown
  Obtained from environmental sample
  DOMAIN (76)...(109): Tetratricopeptide repeat
  misc_feature (1)..(248): Xaa is any amino acid
MAAKKENPAARALLAFVLNRMGETDKAVDQWEKSVTEDGSNSAIHVNLGLSYESKGQYDKALESYKKAQSLNPSDKAVYINLGNAYQGLGRTAEAFDAFTRGLESNKRELAAYDIFLLSRKRGDADRAEKMYALLKKEFPSSAHCARVSAEMDLVKGDTAKALAAYESIKEKDAHDWFAVARAGAALGQKAKAENALAKVPDDGVWKRDKSVVRARLAFNGGDYKGAYQAYKEAVNASGKDGAADADA

SEQ ID NO: 105946 - protein, 156 aa, Unknown
  Obtained from environmental sample
  misc_feature (1)..(156): Xaa is any amino acid
MRLTNIPVALAALLAVAAPAWAQANEANSAEGANEKDTRQDPKLKETMQNNPLLRHWNTPYGAPPFAEIKEADYLPAFRTAMDLQMCEVADITRSRAHPTFANTVVPLARSGGHLAKVQNVFFGLLDAESTPDMQKLAEEIAPMLSEHEDGIYQYD

SEQ ID NO: 105947 - protein, 200 aa, Unknown
  Obtained from environmental sample
  DOMAIN (90)...(168): PDZ domain (Also known as DHR or GLGF)
  misc_feature (1)..(200): Xaa is any amino acid
MVRHRVALSIASMMLLAICLGVFVNAQGIGRENAYDNLEFFGRAFQNVRNYYYDTEKIKSRDLIYGAVRGMLDALDDEHTSFLPPAELKYLSEETSGEFGGLGIVIGIRNRVLTVISPIYGTPAWEKHIQAGDVISFIDGVTTTDLPLNDALRKLRGPVGTSVTVTLMRPNQDDPFDITIERALIQLKPKIHLPRKRGCT

SEQ ID NO: 105948 - protein, 238 aa, Unknown
  Obtained from environmental sample
  misc_feature (1)..(238): Xaa is any amino acid
MAVDKKRIGGKDHALYLLTGSANIFALPRLADALVGRMSTLTLYPFSASEIKGTGVNFIEKLWNNDLSPGKYTRTNVVDIISASTFPEIAINKKKDRHLWFNDYITTILQRDVRTLADIKNPENVYHLLTSFCQRAGGLLNNANVMKETGLDAKTYDKYKALCISTFLIYELPSWAKPNKLNKRFIKQKKLYFTDTALLCHLLHRGMEEISKTDMTTMGHIFENFIAGEIMKASKSLG

SEQ ID NO: 105949 - protein, 219 aa, Unknown
  Obtained from environmental sample
  misc_feature (1)..(219): Xaa is any amino acid
VREGMAFSDALDQAGGFPAVYKANVVAGERSGTLPEVISRWLAFQKFAQNSRRRITEALFYPAFLVVVLTLSLLVMFNYVLPKFSQVFESGGQELPTLTQWLMSFGNFMSSTVYYQLGLLVALIVFARWLTSSERGGRALERALLAVPRLGTLYRMYHSSVFTRTISVLLSGGLPVLQALEVIQRTSSSHRMKTKLYTIIETVRAGGALHQALDRAKML

SEQ ID NO: 105950 - protein, 246 aa, Unknown
  Obtained from environmental sample
  misc_feature (1)..(246): Xaa is any amino acid
YKDYHDALKAIETAFESRRYAVLTGAILERGSSIAEAQSRREALRASIASAESRVEKMNLDALEKENELGAASRSVAEAGEGIAAIDRDLSVAAERVSNLKAAVARLDGEAAQLDRESEEASQLKTQIEKSVVERETLLRESSERAAGAGEELSAFDAHLSAKRREADEIGRNQIELINSLGEAKNRQSVANGALNAALDGKSRNEREIAALEARYEEYEDAAEACRRQLEEVNSANSGLMDARAA

SEQ ID NO: 105951 - protein, 256 aa, Unknown
  Obtained from environmental sample
  DOMAIN (49)...(256): Nicotinate phosphoribosyltransferase (NAPRTase) family
  misc_feature (1)..(256): Xaa is any amino acid
VVFPQEPLIRVRGNLIECQIIEAMLLNTINFQSLIATKTRRVWLASGQGSIMEFGLRRAQGPDGAMSASRAAFIGGAIGTSNTLAGKIYGIPVMGTMGHAWVMSFPDEKDAFDAYAELYPDRSVFLIDTYDTLQYGVLNAIKAGKKLTEQGKKFGVRLDSGDIEYLSAEVRRMLDNAGFNDASITVSNELDESIIENLVRLGAPVDTWGVGTNMVTGGSDAALTGVYKMSAVEDKDGNMTPVMKFSDNPEKTTSPG

SEQ ID NO: 105952 - protein, 275 aa, Unknown
  Obtained from environmental sample
  DOMAIN (15)...(275): Protein of unknown function (DUF1016)
  misc_feature (1)..(275): Xaa is any amino acid
MKSDNKSLIQNNTTAFEEVISIIEHARENAFRAVNHELISMYWEIGRYISKKVDAENWGKSIVQEFSQFIQSHFAGIKGFSPQNIWRMKQFYETYAKNEKLSPLVREISWTNNVLIMMAAKTDEEREFYLLLSAKNNYSKRELERQIDSSLYERTMISNEKNQLFISRNAGLTALRDSYVLEFLDVPERHKEKELRKAIIANLRDFILEFGRDFSFVGEEYRVQVGNTDFNIDLLLYNRELSCLVAIELKIGRFKPEHLGQLEFYLEALDRDEKK

SEQ ID NO: 105953 - protein, 142 aa, Unknown
  Obtained from environmental sample
  misc_feature (1)..(142): Xaa is any amino acid
MRSRMFLWIALLSAVLVSASASADDKRGDHPARKMLEVLNLSAEQEARFKEINSQYAPVRRENSQRIEELREKINQEILRDKPSKSMLIQYAGTIGELQKKMSLSSVNHLLEVKSVLTPEQFKTFVSMSPSTTGGRRGGGRR

SEQ ID NO: 105954 - protein, 105 aa, Unknown
  Obtained from environmental sample
  DOMAIN (5)...(28): Prokaryotic N-terminal methylation motif
  misc_feature (1)..(105): Xaa is any amino acid
MKRRRGFTLIEILIALTILSILATLGIAGYRHHRRGAAETVLKANLSILRHAIEQYKADRGRYPASLDDLWREASKRYLQSLPIDPIARSDKMWVVEMEAPDPDS

SEQ ID NO: 105955 - protein, 260 aa, Unknown
  Obtained from environmental sample
  misc_feature (1)..(260): Xaa is any amino acid
YSAKIASGRVLGQSMQGWQFMYGADMANRDRGQNIRTMAPLPIVWDANTTPRYRSIPTPNLLRGMGISVSAKDPIRIIRFVNDLLAEDVQRTINWGIEGQHWQWNAQKIPYRTPQQRTNWLNDQWQEQNRLRLLDDVFPKIQGSFSDGFPSDLSYYFPEREAMILPEDLELYKAYGVNSTNELMDKNPPPNAPWFPTWSMAPPPDGSPAQIALQRCEQTMKQRLPQMILAPPADFERLWAAYVTEMNNNGLAAYEAFMQD

SEQ ID NO: 105956 - protein, 248 aa, Unknown
  Obtained from environmental sample
  DOMAIN (1)...(248): Major Facilitator Superfamily
  misc_feature (1)..(248): Xaa is any amino acid
LLFGLDIGVIAGALPFIADEFQITSHTQEWVVSSMMFGAAVGAVGSGWLSFKLGRKKSLMIGAILFVAGSLFSAAAPNVEVLILSRVLLGLAVGVASYTAPLYLSEIAPEKIRGSMISMYQLMITIGILGAYLSDTAFSYTGAWRWMLGVIIIPAILLLIGVFFLPDSPRWFAAKRRFVDAERVLLRLRDTSAEAKRELDEIRESLQVKQSGWALFKENSNFRRAVFLGVLLQVMQQFTGMNVIMYYA

SEQ ID NO: 105957 - protein, 81 aa, Unknown
  Obtained from environmental sample
  misc_feature (1)..(81): Xaa is any amino acid
MAGTGFEVFVFVAEAVDTVTLKKKFNSDLEKDKKYIEGLRAKLANEQFVKNAPEQLVEEQKSKLDESLKRTEKFTSYLRDL

SEQ ID NO: 105958 - protein, 261 aa, Unknown
  Obtained from environmental sample
  misc_feature (1)..(261): Xaa is any amino acid
MRLLFSGIGIVVYTSLCAYIGARLFAFIRYFMPGAKAFVYWPAFILLCYAFAFAGFIRTPYLRFLQHIGAYWMAVFIYLLLLLPLFDLLRLGLFLFRRNVLTPRFTVAGIGAMLCLCAVIIAYGSLHARSIRTVQYALRLAGQGNGLRIALISDLHIGSSVGQRHIAKVVNVINKTEPDIVCIAGDIFDGHLETVRNLPGIAEEFRRIRAPLGIYTCLGNHDVDRMFPFGGGTERIEAFLREAGVTLLQDEVAAIGDNMYI

SEQ ID NO: 105959 - protein, 286 aa, Unknown
  Obtained from environmental sample
  misc_feature (1)..(286): Xaa is any amino acid
APFTGKEKFYTAGYLHAINIWTTILEISVVMAQFPSPRIAELSCQYRTLGLGFANLGSLLMVMGLAYDSKEGRAVAAALSAILSGEAYAQSARMAAELGPFSRYEENREAMLRVIRNHRRAAYNAASDEYELLNTIPQGIDPSYCPAELLAAARQAWDHALELGEAQGFRNAQISAIAPTGTIGLLMDCDTTGVEPDFALVKFKKLAGGGYFKIINQSVPQALEILGYTKSEIETITAFATGHKTLKGAPAINPESLSAKGFTPEALAAAETASASAISLESVCNP

SEQ ID NO: 105960 - protein, 228 aa, Unknown
  Obtained from environmental sample
  misc_feature (1)..(228): Xaa is any amino acid
LTENVQNGVPYEQQLIWQLFNETLKAIDILGGDTAFRTELQDKFNKLDKGLKVEDGSRTGVGYASGLLSEYKYAGARLEQGHRHISHLVGLFPGDLITPDRTPYFEAARKSAADRGDGGTGWSRAWKINFWARLLDGAHARTMLKSALTYTVSGSGIFENLLDSHYPFQIDGNFGATSGVAEMLIQSHRGFIEVLPALPSQWSSGSFKGLKAQGNFTVDLEWAGSRPT

SEQ ID NO: 105961 - protein, 248 aa, Unknown
  Obtained from environmental sample
  misc_feature (1)..(248): Xaa is any amino acid
MLFWSCKNEDDPPETAKIPTATPTIAPPETVAAPVATPVAGGFEAAQNITLTATDGARIYYTTNGETPTTSSTWYSSPIAISATTTLKAIAVKGGMISEILTAMYIITIPPNTVIQPMASPEAGTYTAAQNITLTTATPEAKIYYTTNGETPTVDSTLYSNSNPISVSETTTLKAIAVKDGMINSDMLEAVYTIVPPEPAARPTATPAEGTVASGTTVTLATTTFGAEIWYTTNGAAPAKDGNGSTQY

SEQ ID NO: 105962 - protein, 246 aa, Unknown
  Obtained from environmental sample
  DOMAIN (58)...(246): Adenylate and Guanylate cyclase catalytic domain
  misc_feature (1)..(246): Xaa is any amino acid
EIEGGTFNVELQPKGWDEIGVLTASFRKMSSALQIFGRFTNREIAIKAMRGQIKPGGLPKHGTILFSDIRDFTEKSETFTKTFGADASDKIVNWLNHYFSKMVECVEKTNGIIDKFIGDAVMAHWGTAYTSGKPAQDALNCIMAALMMRKALYEMNRKRKKDDPSNPSIHIGCGINTGIVTAGQIGSDRRMEYTVIGDPVNLASRIEALNKPLGTDILISEDTYNLVNKFIIVEEMPSVTVKGKEK

SEQ ID NO: 105963 - protein, 257 aa, Unknown
  Obtained from environmental sample
  misc_feature (1)..(257): Xaa is any amino acid
MDERSDMNSAFDRLKNTLTTDKTKTEFSKGDKIRSDYETSFSEFETKISNILNESNDDAKNNLVDDTLNFIADGTAAIEDWIGSMMSQKEVEASGANDASDQIAASNMGIQIVLLVVIVLVSVLVGMLVAGGIEKNLKEIIGKVTSTSSSIHESVDQLTRAAENLASGSSRQAAALEETSATMNETSSMVAQNAENTRIASQLAADSLSVVDSTQNSMSKLMEEMTELKESSDRVGKIVKAIDDIAFQTNLLALTLL

SEQ ID NO: 105964 - protein, 224 aa, Unknown
  Obtained from environmental sample
  DOMAIN (1)...(158): Secretory protein of YscJ/FliF family
  misc_feature (1)..(224): Xaa is any amino acid
MRLNQEGVRVTVSPAGVIQVADQDTARRMRGILIREDLIPQGTDPWAIFDRDRWTITDFERNVNLRRAITQMVVDHIRALDDVDNANVTIVVPEDRLFASEQNPVSASVIITPKPGSDILQNRKKIEGIQKLLKFAIEGLKDENIVITDQTGLVLNDFTGLAESDRLSLIDRQTKMIRQYEAQYRAKILATLQKTYTEDRGRDLDIKITMDMSKKAVATEEYFP

SEQ ID NO: 105965 - protein, 247 aa, Unknown
  Obtained from environmental sample
  misc_feature (1)..(247): Xaa is any amino acid
ETIRNLLPWLNEQDILRFLDAYFSTDKSDKLKKFVTTNHNIQIIQDFSAGSNATTMLAMNDTGTFYRKYAFGNDGEKLYIQFKWLREHTDMLPLPVIIHHQYDDGYFVYDMEYHAMATDLFNFIHYTSSDRSWFILEKALDCLHNNLHTRNVRPADLEQVRQYINDKVFANIKKIETAKELRALLEYDTLVINGEQYHNLNYLKKWLNSDFLIHIFSKDICTDIHGDFTIENLIYLETNHGYPFYFI

SEQ ID NO: 105966 - protein, 273 aa, Unknown
  Obtained from environmental sample
  DOMAIN (26)...(167): ABC transporter
  misc_feature (1)..(273): Xaa is any amino acid
SSAVRHSPKGSSLRDEAETAFGFAHNLLERLEETGKLLEKSKDGDSSTQSLIEEHHNLQEQIENSGYYRREAAISSVLAGLGFSASDINRETGEFSGGWQMRIALAKVLLEQPDILLLDEPTNYLDIEARTWLEKWLESFSGGYLLVSHDRYFLDVCVNEVYELFQGNLKRYAGNYTSYEKVRKIELASLVKRYEEQQEEIVKTEALIRRFRYKASKAAFAQELIKRLDKMERIEIPESLKKINITFPPPPHSGNIALTLEGIGKCYGEHRVL

SEQ ID NO: 105967 - protein, 265 aa, Unknown
  Obtained from environmental sample
  DOMAIN (1)...(264): tRNA synthetases class I (I, L, M and V)
  misc_feature (1)..(265): Xaa is any amino acid
AQLYVGQDRFDVRKQIETDLRNAGLLEKTEDYTNKVGCSERTDIPIEPKLSMQWFVKMKDLSKPALNAVMEDVIKLYPAKFKNTYRHWMENIKDWCISRQLWWGHRIPAWFLPQGGFVVAENEEDALNLAREKSGNPNLALSDLRQDEDCLDTWFSSWLWPVSVFDGINHPDNADIKYYYPTNDLVTAPEILFFWVARMIISGYEYMGDKPFRNVYLTGIVRDKLGRKMAKQLGNSPDPLELIARYGADGVRLGMLLTSPAGNDL

SEQ ID NO: 105968 - protein, 118 aa, Unknown
  Obtained from environmental sample
  misc_feature (1)..(118): Xaa is any amino acid
SNRKQLSNANIRISDIAKSVNISPEKIVTALMSDLGCTFEQQLTYKRLKHSQKLMRDPGLSIEEIARRSGFENLDTYKKAYAAQMKVDPEVSRKAMLERIKEDMEAEKEDDDDDDDRL

SEQ ID NO: 105969 - protein, 250 aa, Unknown
  Obtained from environmental sample
  misc_feature (1)..(250): Xaa is any amino acid
KGHTLFLITHTLERLELCDRLVYIQAGRMLFSGAPGDICGRFNASSVAQVYEMSNAGAIGAGAGPAAGAAAEPVFAASASAQELPRRDWAAPLRHPVKALRFFFRQSLALAARYAKVYVRDRRNMLLLMAQTPLITLLLGFVYKTSALQFPVSFYFCLAVTGIWVGGLDAVREVASELPLLAREARCGMNRWAYIIARIAVAAALSAAQALLFAASAAVIFKQLEFSWPLLVLLYAAVFSGNLLGLAVSA

SEQ ID NO: 105970 - protein, 84 aa, Unknown
  Obtained from environmental sample
  DOMAIN (2)...(81): Ribosomal L27 protein
  misc_feature (1)..(84): Xaa is any amino acid
MARKRGGSGAKNGRDSNPQYLGIKASGGTLVKAGTIIARQRGTRIHPGTNVGCGGDYTLFAKADGTVQFHQRRGRKLASVIPQA

SEQ ID NO: 105971 - protein, 105 aa, Unknown
  Obtained from environmental sample
  misc_feature (1)..(105): Xaa is any amino acid
VIPVTGRPAGWCDCIVRQWPVNGIIGENGALAFWEESPAESSSRLPVLKSMYHPDAISNDHPVLRQIREQALAEVPGLRDAKDQFARLFDIALDFAEEEPVLPLS

SEQ ID NO: 105972 - protein, 281 aa, Unknown
  Obtained from environmental sample
  DOMAIN (73)...(146): Bacterial Ig-like domain (group 3)
  misc_feature (1)..(281): Xaa is any amino acid
YFIDEPLDLDGLEVTANYSNNAKEKVFIGVKNVSGFDSSTPGTKTLAVTWKEKTDTFDITVDNITLSKVEITRLPAKTGYSMYEELDLDGLEVTAAFNDKSTRELSIHELEVTGFETNKAGEQTITVSFAGTGIGAGLSDTFKVTVTAKTFTIIFDKNGGDSDANPTAKTVTQPTENIGTLPSQPVKAGYHFTGWNTKADGNGNHFFATTLVTDSFTVYAQWFKPVVTFYSNGGSEVESQNINYGTTATEPTVPLKTGYNRKFDGWYTDAETLIDEWDFTN

SEQ ID NO: 105973 - protein, 281 aa, Unknown
  Obtained from environmental sample
  misc_feature (1)..(281): Xaa is any amino acid
QYHRNVNSGTEPEIFVIEGKAGYEDAKGAGRISDLSNEPWVKDTDVAYVDPANGKIIGFPVAVEGWGLGYNKALLAKAGVDPKTMVNAAGIMDAFEKIESQKSALGIDAVVSMVAGPGMTWVTGLHGFNAYLTLGLPYNNSGKYIDMLLKGQVDTPRLTKYAEYYNLLFKYANRNTLLTGGYDQQIGDYAIGKTVFIHQGNWTDPTFKDLGITFEMGYVPHAFLDETTDGIFVGAPSWYLINAKSKNIEGAKKFLIAMASTPEGHDYMVNKAGMVPAFKSC

SEQ ID NO: 105974 - protein, 149 aa, Unknown
  Obtained from environmental sample
  misc_feature (1)..(149): Xaa is any amino acid
MADVARGSNIDTKGGTQKGLGLNNLLKLGPGGSINGSLMGFAVVVVLAMFIVPLPTVILDALMAFNFVLSLLVLLIVLDNKKPTDISLFPTFLLVITIFGLALNISSTRLILIQGSRFNGRMIRAFATFVVGSGGTIGLVVGFVIFIAI

SEQ ID NO: 105975 - protein, 170 aa, Unknown
  Obtained from environmental sample
  misc_feature (1)..(170): Xaa is any amino acid
MINIPCEDCMDLMPRFPDRHFDLAVADPPYGIGEDWKRRAHTKNKFTANAAYKNNEIPPKEYFCELRRVSKEQVIFGYNYFAEFLGPTNYLIVWDKLSGSNESFLYSKAEIAYTSIHIPVQVIRVPWDGWRMGKETGERKIHPHQKPVELYVKILRKYSKPGWHVLDTHM

SEQ ID NO: 105976 - protein, 49 aa, Unknown
  Obtained from environmental sample
  misc_feature (1)..(49): Xaa is any amino acid
MEKLFKLQEKGTTFQREIVAGLTTFLTMAYILAVNPGILSGRFADAELL

SEQ ID NO: 105977 - protein, 249 aa, Unknown
  Obtained from environmental sample
  DOMAIN (14)...(227): Phosphomethylpyrimidine kinase
  misc_feature (1)..(249): Xaa is any amino acid
TGYGAWKGKVLGGELAEELVLGLEERGVLPQCEAVLSGYLGDAAVGRAITGAVRKVRAAAPQALYCCDPVMGDVGRGFYVKPDIPDMFKNELVPLADIITPNQFELEALTGLETNTVDNARRAVDIIHAKGPGIVLVTSFRGGVSSGQIEMLASDKSGMYVISTPELPIAVGMAGSGDITASVFLSRYLETGDIKKTLELCTASIFGIIEASWQVHSTAAAKPGPMELRIIQAQKELDSPSHFFQARKL

SEQ ID NO: 105978 - protein, 73 aa, Unknown
  Obtained from environmental sample
  DOMAIN (37)...(72): Sel1 repeat
  misc_feature (1)..(73): Xaa is any amino acid
MGRLKLLALAGLMAAAFSVSADDDIQSLTRRAEQGNAAAQANLGWLYQNGEGVPKDAGQAAVWYRKAAEQGTP

SEQ ID NO: 105979 - protein, 210 aa, Unknown
  Obtained from environmental sample
  DOMAIN (133)...(210): DnaJ central domain (4 repeats)
  misc_feature (1)..(210): Xaa is any amino acid
MAKKDYYELLGVTKGVDEESLKRAYRKLAMKHHPDRNPDDKDAEAKFKEIKEAYEVLSDSKKRAAYDRFGHAGLDGSAGASTRSDSFGGFGDVFGDIFGDIFGSARGGSTAGVYRGADISYTLDISLDDAARGTETKIQVPSMETCGTCRGSGAKPGTPHKTCQTCDGSGQIRMNQGFFSLQQTCPRCHGSGRTIDSPCTACHGEGRLKQ

SEQ ID NO: 105980 - protein, 198 aa, Unknown
  Obtained from environmental sample
  DOMAIN (2)...(164): Transposase IS66 family
  misc_feature (1)..(198): Xaa is any amino acid
VRIAPVEPSIIPRSIASPSLLATIFTQKFEMHLPYYRQEKQFEQIGAAISRQDMSNWQQQTHEKLGPLFAMLKETVKSGPVMQMDESEVQVISDIKSGEEDRSDTQKSYMWLARGGPVGKKVIWYEYHRTRAAYNAIEFLQGYRGYLQTDGYKGYDSAAKDLPGIIQVGCFAHARRKFFEAAKISCKSRSAEGGIKYI

SEQ ID NO: 105981 - protein, 275 aa, Unknown
  Obtained from environmental sample
  misc_feature (1)..(275): Xaa is any amino acid
MVSPLAACGMGFTFLCQSQLAVAGWSNGPCICEDQGKIITVFPVYNSLEKTLANKTISAALLEFSSGFPEEKEILVSIFPQKLSSDANEACDITWNHFFEELYRCENFAETITPGKLYKNLKGMQKLYIPDSTETGNCMSNNAANDALHCISPRGFITVNPESGGIYSKMMFTNLLINQLKGDKSRKLSAREELWKAQSGALFCSSGYQAHNNHSLRNAAYSALLGAERITRDKQKFIPSLTSFDINMDNTDEWLFQDIRINFYVQSLGGGVFEL

SEQ ID NO: 105982 - protein, 249 aa, Unknown
  Obtained from environmental sample
  misc_feature (1)..(249): Xaa is any amino acid
TYSQTPEPMGITIHEEFGNPDLPSTKAAHYIAGFEWQINELVSLDAQTYVNRIWDVARPYDEKIDYDPARDIQRRYFSDGRQRMYGLELMLRHSRSEKFFGWISYTLARSEMWSKREGKYILSNRDEPHNLQLLGSWRLKNNWEVGARTRFVSGRPTSPIVATVESENGRNIRPVYGEQNSTRQDPFFQVDMRVDKKFISDKFILTYYVDLQNLLWPLYKSPELTYYNYNYTEKQKISMIPLAATGIRV

SEQ ID NO: 105983 - protein, 75 aa, Unknown
  Obtained from environmental sample
  misc_feature (1)..(75): Xaa is any amino acid
FIDDPTRKKGLGAKAMTQWENEMRSVGHRLVMTSTMVEETSQHFYRKLGYRDCGCLIKPFPPFEETMEMFFMKQL

SEQ ID NO: 105984 - protein, 249 aa, Unknown
  Obtained from environmental sample
  misc_feature (1)..(249): Xaa is any amino acid
VLHIDFTAYRYAITIKDALKRKKDNADSASLDFAISMDVITEQEDEIRKTPLSKCSDLEILRAPVALSNYLPEIRELSNRQNVDISEARLVSFLDSASSLLTRLGMTVNLPKSLVKELKPRLVIKGSARGSSLVHYLDLNALQDFQWQIAVGDEVMTLDEFKKLLKEKRALVRFRDGFIKMEPHEFSRLLKNAKSAPPDMNDFLKAHFSGNTVLEFDVRRTIDNLFREQNFPVPSALTANLRPYQKRRI

SEQ ID NO: 105985 - protein, 66 aa, Unknown
  Obtained from environmental sample
  misc_feature (1)..(66): Xaa is any amino acid
MTTAAKAAGVSRTSLYQSLSEDGHPAFETIAKVAKSLGYRLSLVPVSKLTVKKVKRINSKKAGISV

SEQ ID NO: 105986 - protein, 276 aa, Unknown
  Obtained from environmental sample
  misc_feature (1)..(276): Xaa is any amino acid
LNDLFLEAVRYPLVVVCAGAGYGKTTAVHDFLKGYDARKAWIQLSERDNVGGRFWESYTHSVSKTSKTLAEAISNLGFPDTREKIHHYKALVNETALVEKRVLVIDDYHCIEDKSVLRFMEEGFFRNMLQGSTVIVISRSISHLNVAGMTYRDQIFNINESDLRFTENELNQYFRRMGISFQTDSLREIMQDTEGWAFAINLIARSCQKAPGYSGYVRSAMKQNIFRLLEMEIWNSLSEQLQNFLVRLSLIDHLSVDLLNQLAGKEEEFAAERKSK

SEQ ID NO: 105987 - protein, 172 aa, Unknown
  Obtained from environmental sample
  DOMAIN (39)...(171): IPP transferase
  misc_feature (1)..(172): Xaa is any amino acid
MPDPPRVVCIAGPTGAGKSAAALRLAAEFGGEVINADSRQVYADFPIITAQPGPEERRLHPHHLYGFLRITDRISAGQWAGLAAANIAKCAARGSLPLLVGGTGLYIRAITQGMADIPPVDPAVAQRLEEEYARLGPQALHARLAEADPSYAARTPARNRQRVLRALRVWEC

SEQ ID NO: 105988 - protein, 273 aa, Unknown
  Obtained from environmental sample
  DOMAIN (9)...(205): RecF/RecN/SMC N terminal domain
  misc_feature (1)..(273): Xaa is any amino acid
ERQLGQKPKFDRITIKGFKSIDSAELKLHDLNVVIGANGSGKSNLIGAFDLLEHVLSGRLQQRVAQDPDRFLHHGRKVTNELCLAFFSKHDEYSFNLRAEKDTLLFGDEKAAFLHGHFTDRRPITVGSGHLESKLEEKAKSSGSQIVRYILDFAKNSVVYHFHDTSDYSPAKRIADLEDNRFLRQDAANLPAFLYRMQEKEDEQVCFRMIEEHIRLVAPFFDRFELAPSELNPNKIKLVWRQKGSNAYFDAYSLSDGTLRFICLAALLLQPYM

SEQ ID NO: 105989 - protein, 231 aa, Unknown
  Obtained from environmental sample
  DOMAIN (3)...(231): Glycosyl hydrolase family 3 N terminal domain
  misc_feature (1)..(231): Xaa is any amino acid
VKTGSGIAPFVAVDHEGGVVQRFGPGVERLPSAFSFWELAQKEGRKASLARAETLYRRSAQEIRELGITMVLGPVAETHNDENLKFLETRSYGSDHGFTGEAASAFVKSMSAFGIASAVKHFPGNGAADPHDGAVAIGAGKPALDEMVKPFAALIRGQSPSAIMLSHVMVPALDSRKNASLSDKVIKDWLRGELGFKGIVLADDFSMGAIAASGLSPGTAAVEAINAGVDM

SEQ ID NO: 105990 - protein, 243 aa, Unknown
  Obtained from environmental sample
  misc_feature (1)..(243): Xaa is any amino acid
MALSKEQEKWLKKISGYYHYDGDKVRKIPAELLTEEFCIAVVNENGWLLEFLPDARKTEAVCLAAVQKDSSAMEHVPEALKTGTFYIATAQKNGDVLKYVPEALKTKALCLAAVQQNGYALKDVPDALKTEAICFAAVQKDGSMLQYVPEALKTEAVCIEAMKHSSVHITILYRGGMGMQTPPPPTHPLQLVPEKLKTEAVCLAAMQSDQRAAIPTDLTALDFMPEAIKTKAFMAKIRAIMSA

SEQ ID NO: 105991 - protein, 191 aa, Unknown
  Obtained from environmental sample
  misc_feature (1)..(191): Xaa is any amino acid
VPEALKTEALCLIAIQQASDTLKYVPDALKTESFYLAAVQRNSYALQYIPEKLKTEALYLAAVLQHESAWDRIPKELEDSVEAAFTNAFSTEALCLAAVQKDGNMLKHVPDTLKTEALCIEAMKHSVCSSFNRYIDSSYKPTPYTYHPLQEIPNALKTEKVCIEAVKQDEGAIEFVPEGMRDVVKAAVKKE

SEQ ID NO: 105992 - protein, 85 aa, Unknown
  Obtained from environmental sample
  misc_feature (1)..(85): Xaa is any amino acid
MALNKEQKEWLEKISYDPEELKEVPKELLTEKFCLAAVQDDYRALEYVPDVLKTEAVCMAAVKQNPSAIEFIPDAKKTETLCLAL

SEQ ID NO: 105993 - protein, 170 aa, Unknown
  Obtained from environmental sample
  DOMAIN (1)...(151): Phage integrase family
  misc_feature (1)..(170): Xaa is any amino acid
DLALAELLYGAGLRISEALGLNVHDVDPRSGVVRVLGKGNKARLAPVSDTALHALAAWMAARPELATGAEPALFVGTRGGRLNRRQAARILDELAAHAGLPHVAPHSLRHSFATHLLEGGADLRGVQELLGHARLSTTQRYTHVTLDRLMQVYDRAHPRSQTARRDEEDD

SEQ ID NO: 105994 - protein, 67 aa, Unknown
  Obtained from environmental sample
  misc_feature (1)..(67): Xaa is any amino acid
MKIAVIGGGPGGYVAAIRAAQLGAETTLVEKDKLGGVCLNVGCIPTKALLHCAALYTEAKEGAHCGV

SEQ ID NO: 105995 - protein, 268 aa, Unknown
  Obtained from environmental sample
  DOMAIN (139)...(268): Transglycosylase
  misc_feature (1)..(268): Xaa is any amino acid
ENVPRRRRGDADTHTFVETGDATVLKKLLIVLLIIAGAAAVCSVPAYYGAKYAFNNYFERWGAKLVDLENRGLLSREYGAGWQDVLMGKAMELEAQRITDTSGEFSEGQRIVDGVEVSDFPSLAVVKLLNEVREYSNTILITDRADRQITRIKTDHRRARMAEFPKTLVTALIAAEDKNYMTNKLGFSFESFVRAFANAVPATIKRFRPATPRGTSTITQQVAKLFMSRLDEAGQRRVSNTLNRKTRELKLAAALRKVYTPEEILEVY

SEQ ID NO: 105996 - protein, 238 aa, Unknown
  Obtained from environmental sample
  misc_feature (1)..(238): Xaa is any amino acid
MAMTYVFEVKDNGSATFKKIETNINIVQQSLTLVDKSTNIFNKSLTNLNNTYKNYNNTSNVFNNITNNVSKSLGMLKTAGAAALGNIMVQGVAELKNLTKEMVDAYDSANKLSQNLGITADSVLGLRHAAELSAVGADAMDKNMEKLSKTMFEAASGNKTAGESFKQLGISVTNSDGSLKKSDAVLMEMADRFKSLPPGAERAAAAMSIFGKSGASMVTMLKDGSGALKKMVDEGAGA

SEQ ID NO: 105997 - protein, 162 aa, Unknown
  Obtained from environmental sample
  misc_feature (1)..(162): Xaa is any amino acid
MGDFLSELVGNDRSSLEQKKRVDRARKDFGFFCRYYLHDYFFTDPADYQKILYDVADTRSLSKETSSRLKPFINERYHSLLKPTEHLAGAMFVEPREHGKTVRWSFAYVLWSIVTGKNRYALLIGASGDAARENLINIKIELEENELLLEDFKELKGDIWRD

SEQ ID NO: 105998 - protein, 191 aa, Unknown
  Obtained from environmental sample
  DOMAIN (31)...(188): ABC transporter
  misc_feature (1)..(191): Xaa is any amino acid
MPEPIVAVRQVSKSFGRIAANVDVTFDVASGEILGLIGPNGAGKSTLFACIAGAETPDAGEILLEGRLISGLGAVACTRAGIGRTFQVVRSFDSMTVLENVMVGAFARVARTRAAMARAVEVIEFCGLGPRVDTPAHSLTPPEKRRLEVARALAIEPRVLLLDEMLTGLTPTEAQAGMQLVRDVRDRGITI

SEQ ID NO: 105999 - protein, 66 aa, Unknown
  Obtained from environmental sample
  misc_feature (1)..(66): Xaa is any amino acid
MALRTALRATNIPGDQTIMPWHGIKFDDTGQNTEGKPVIQQFQDGQWRTIYPFDLATKAAIWNVSA

SEQ ID NO: 106000 - protein, 163 aa, Unknown
  Obtained from environmental sample
  misc_feature (1)..(163): Xaa is any amino acid
MTASLVTQVAIGGLLMGLVYALVAAGLSLIFGLMDVVNFAHGQLLMLAMFAVYEIHRATGLDPLVQLPLAAALLFLVGVAIYRGLIARALGVRFNTGMVQVFVTFGLSVFLVGVAQLVFGSNFESINDVLLSGRTISFGDIVIPLPQVAAGVVCLLAFAALML

SEQ ID NO: 106001 - protein, 261 aa, Unknown
  Obtained from environmental sample
  misc_feature (1)..(261): Xaa is any amino acid
AQRLLYESEERLKIGGIAPIELVALRAEVASRERQLFDAQTSYRQKALTLAYLMNAPDLMDAELSLTDSAGANFGTADAVNDHVEAAKMFRPDYLQAFMQAQKGELDLVQTKNGLLPRLDFHASLSGVTDAKSFPSALAPAAGGDISPVIAAGLTLQLPIKNGSAKERYRRSEFSMEQQRLSIDNYVRLIDYEIRSAHTEVLRARRQIETAKTVSALQLQKLEAEHEKMSAGKSTGYAVLQVQRDLVSAHLDEAQAKTAYV

SEQ ID NO: 106002 - protein, 197 aa, Unknown
  Obtained from environmental sample
  misc_feature (1)..(197): Xaa is any amino acid
VLKTDQTLRPEEADQLERRWENKYGNVKSGRKIAVLGKGTEFKPITFTPDVIKLFELKKWNLYTILAKFGIPPRVANISDKSTALSGKDTAEQHAAFWKYTLIPLLKHFEQILESKFFIRFGIKERGVFDLSDIPELQESEDAQSKRDIEEINAGLKTINDVLRERGKETKPWGDVWYKPQNLIPVSISEKKELKKE

SEQ ID NO: 106003 - protein, 108 aa, Unknown
  Obtained from environmental sample
  DOMAIN (8)...(57): Uncharacterised protein family (UPF0150)
  misc_feature (1)..(108): Xaa is any amino acid
MKAMQYKNYAARIEYSDEDKCFVGHIAGIRDIVGFHGESVDELYAAFKEAVDDYLETCEKENISPQRPYSGKVMIRISPELHAEIAMKAEASGKSLNQWAAETLAFAG

SEQ ID NO: 106004 - protein, 157 aa, Unknown
  Obtained from environmental sample
  misc_feature (1)..(157): Xaa is any amino acid
YIGKELQRLYNETGLLGKDLIFSADNTSFSTQDGVLYNKNKTSLISCPESKTGAFTIPNSVTSIENDAFMSTKLSSIIIPDSVTSIGRNAFFYCWNLTSITFQGTISSDKLFYDISDGFDITSFSGDLRKKYLAEGIGTYIVTKKTENGLQEVWTKQ

SEQ ID NO: 106005 - protein, 184 aa, Unknown
  Obtained from environmental sample
  misc_feature (1)..(184): Xaa is any amino acid
MEILVDKRIELLAVIQTIAQYWDNLSLKYFNKQLFKCKYKENIDKHFNKFKNHETINLYGKLCNCVQDFSAFINLILCYSNPPNFDNIADIENNINNLDKKSISYDKFIEGIKRFYEDTNFECFFEKNKNEYEKLINGYMNKNDLKEYINIVNNYLGNNTENYTITVSALLMGNFGIKILTNEN

SEQ ID NO: 106006 - protein, 114 aa, Unknown
  Obtained from environmental sample
  DOMAIN (9)...(114): Biopolymer transport protein ExbD/TolR
  misc_feature (1)..(114): Xaa is any amino acid
MSFVKKFRNKDSGGIDIAPMLDMVFILLIFFVVTSSFVRETGLDVNKPKASSAQELARESILIGISREGTIHINESQVDLRALRAILQQMVAEKPDAVPRVIVADREAPSGKIV

SEQ ID NO: 106007 - protein, 74 aa, Unknown
  Obtained from environmental sample
  misc_feature (1)..(74): Xaa is any amino acid
VLFLDGELEKIIRAEGEKAYPNECCGVLIGEADCAGDKKVKHVQAIDNAREGGEQYHRFLITPEDMLRAEQAAR

SEQ ID NO: 106008 - protein, 61 aa, Unknown
  Obtained from environmental sample
  misc_feature (1)..(61): Xaa is any amino acid
MKVLTVISTIFIPLTFIAGIYGMNFDFMPELRYEAAYFIVLGCMGLIGFVMLIYFKIHRWF

SEQ ID NO: 106009 - protein, 91 aa, Unknown
  Obtained from environmental sample
  misc_feature (1)..(91): Xaa is any amino acid
MITSKKLSPERIKEIKNFPIKYDEDSPKLTSDQIARMKPRHSEYWKIEPVKVSLSIKIDADVLKWFKSKGKGYQTRINNALRSIMMQSGSV

SEQ ID NO: 106010 - protein, 193 aa, Unknown
  Obtained from environmental sample
  misc_feature (1)..(193): Xaa is any amino acid
ASKTQPIAKLSYDNATLLCDARDGKLYKFKTIGAGATAQTWMAENLNFDVPDNATDVCYNNNTTNCDTYGRLYNWSTAMGGICPAGWHLPSDEEWTALTTFVGSSTAGTKLKANSTLWSTNTGTDEFGFSALPGGGGYASGSFSNVGYLGSWWSATENDASIAYSRGIYYNGADVNRFSSGKTSLCSVRCVQD

SEQ ID NO: 106011 - protein, 192 aa, Unknown
  Obtained from environmental sample
  DOMAIN (1)...(191): MraW methylase family
  misc_feature (1)..(192): Xaa is any amino acid
MNYHIPVLLNECIESLHIRHNYDYADCTLGGGGHSEKIAELLGEGQKLHCFDRDIDAINAAKPCLARFGEKVICHLEPFSNLGKELAPETLGGVLYDLGVSSHQIDAGRGFSFAGNEVLDMRMDASSLKNAQDYLKEVSEENLAKAFRENSDLEHAARLAKHILLSVSHKEKITAADLSTAVEEVYRNEKNS

SEQ ID NO: 106012 - protein, 195 aa, Unknown
  Obtained from environmental sample
  misc_feature (1)..(195): Xaa is any amino acid
ADTLAAIAGSIAEAEYGIRHDTLTDGIRYLDDNLSAVINAWLDRGLSTGGRMVKNSGQLDYNHWHPKEFSKPRKIKAGFQISETQLARVRFGLWPRQMEDKWFIYFENGRICCHRSWTGNKIYEAEVQRGDSGYIIPEMTVERDAELYGCPDDSEDLRQFHYLIGCGVLGLDLDAPIGKSDADLLSGWGQFGRMI

SEQ ID NO: 106013 - protein, 277 aa, Unknown
  Obtained from environmental sample
  misc_feature (1)..(277): Xaa is any amino acid
VEAKKPSVIIKDFAEPAYQVRRYAYTAKLPLSILTNFAECAVYDTRIKPNKDDKASTARIFYCTFDQYEQHFEFVNSIFSKEAILTGSFDKYIEDNKNKKGTSEVDAEILALVEEWRVELAKNIAKNNPDLSVYDLNTVVQKIIDRLIFLRIAEDKGIEDENLLLSVAKSQNIYEKLILLFIKANAKYNSGLFIGVDWIDRVSIEDRVLSHIIVNLYYPECPYEFSVLPVEILGSIYERFLGKTIRFRAVKGDIHTAIIEEKPEVKKAGGVYYTPQY

SEQ ID NO: 106014 - protein, 170 aa, Unknown
  Obtained from environmental sample
  DOMAIN (125)...(158): Tetratricopeptide repeat
  misc_feature (1)..(170): Xaa is any amino acid
SEDHAKTEHAQSIIKDIDEKGLEDESFNDAYNFIQQGNEEKGMQSIRDYIEKYPSAWNGWFVLGWALRRLGRWEDGAAAFGKAIEMGGCGSDTRNELAICLMESGNLKGARRELESALYDDPENVKIISNMGILALKSGNNDEAAAFFRTVLELDPQDPIALNFFNKNAS

SEQ ID NO: 106015 - protein, 238 aa, Unknown
  Obtained from environmental sample
  DOMAIN (1)...(229): DNA gyrase/topoisomerase IV, subunit A
  misc_feature (1)..(238): Xaa is any amino acid
MGSGRERIVVTEIPYQVNKARLLEKIGLLVSEKRIEGISDVRDESDRNGIRVVVELKKDANPTVVLNQLYKNTQLQDSYGVIMLALVDNQPRTLNLKEMLEHYLTHQKDVIIRRTRFDLARAKKRAHILEGYLKALDHIDEVIAIVRGSQDSAQARENLIRRFEFSQDQAAAIVEMRLRALTGLERERLEKEYNEILAFIQEMEAILSDEKRLHEVIRGELSDLRDKFGDERRTKLIR

SEQ ID NO: 106016 - protein, 156 aa, Unknown
  Obtained from environmental sample
  misc_feature (1)..(156): Xaa is any amino acid
MRHTRGERFWRQLKRDKLTLGACAFLVLVIAASMLAFLSPYDPADINLTEKLLPPCKEHLFGTDEYGRDYFTRALYGGRVSLAVGVLAMLLSTGIGITVGAVSGYFGGVIDTLLMRILDVLLSIPWLILVTVFSLFLSQGFVTVIVVIGCFSWLQM

SEQ ID NO: 106017 - protein, 169 aa, Unknown
  Obtained from environmental sample
  DOMAIN (8)...(167): Type III restriction enzyme, res subunit
  misc_feature (1)..(169): Xaa is any amino acid
MIIKSENMKIPFDSQIEALNHIYDAFNRNINPICALGPGLGKTLVACEIIWHLINKNEENYRILIINKASNYKTWEKELKSFFIVSESKKPINSPSEYIYLHGSDRERYIVNGKYFLPNKMIFLSSYETLSIDIGNELFDLNFSFDIIIYDELHTIINSKKLTNKNKNI

SEQ ID NO: 106018 - protein, 234 aa, Unknown
  Obtained from environmental sample
  DOMAIN (142)...(223): NAD-dependent DNA ligase OB-fold domain
  misc_feature (1)..(234): Xaa is any amino acid
RLKETVRDGAGNPYKNARNMAAGSIRCYDAASCANRGLLCSPFAVIEGLDEDARTKVSKCLKLAALEQLGFTPCVFVLQRKNPTETEITDSISRLKAIASDKGLPIDGIVVAYNDIPYSLSCGRTGHHYKDGLAFKFEDDLSETVLLDIEWTPSRTGELSPVALFETVEIDGCEVSRASLHNLTFIKGLELMPGCRILVSKRNMIIPHVEENLDRGRFNERKVIPYRCPCCGQP

SEQ ID NO: 106019 - protein, 249 aa, Unknown
  Obtained from environmental sample
  DOMAIN (95)...(212): Transglycosylase SLT domain
  misc_feature (1)..(249): Xaa is any amino acid
IPILYSATAPAAKTPPAGKGFFSAPAASTPTPASPAAPTSTTHGKINAVLTRFGEEGYRAPPEMVERVEHYLRLYQGSMRGTIALWLERSRRYLPMIRTVFSEKNIPLELAYVSMLESGFNTAAVSHAGAAGMWQFMPNTARHYGLRVGDGVDERNDPEKATRAAAAYFKDLIAIFGSRSSVLLCMAAYNAGEQRVIKALKRIDDPVRDRDFWHLYRMGWLAQETNEYIPQVIALIIISDNPEEYGFKH

SEQ ID NO: 106020 - protein, 235 aa, Unknown
  Obtained from environmental sample
  DOMAIN (2)...(209): Transposase DDE domain
  misc_feature (1)..(235): Xaa is any amino acid
DIFSLASHEFRVTDDKTGETLANFRAAKGDLFLGDRGYASKRGMSHCLSNGADFILRLRHDAFAMHSEGGERLDLLKLLAAAETGEAVCIPALVDLGGHGLGARRVRVCALKKSGKDMEKTLRWMNHNDNKKQRRVSRGARRFSEYVVLVTSLPDEVAPEDVLSAYRYRWQVELYFKRLKSLLGAGEVPKKRAECMRAWLNGKMVLAVLFEVLLSKLDFSPPWARLSGARAASGG

SEQ ID NO: 106021 - protein, 86 aa, Unknown
  Obtained from environmental sample
  DOMAIN (11)...(83): Protein of unknown function (DUF861)
  misc_feature (1)..(86): Xaa is any amino acid
MNITVKKAGEAEKSEMESKPIWECEVSEFDWHYDSEERCLLIDGEVTVSYDGGSVSFGSGDYVVFPKGLSCVWKVSKPVKKHYIFG

SEQ ID NO: 106022 - protein, 250 aa, Unknown
  Obtained from environmental sample
  misc_feature (1)..(250): Xaa is any amino acid
DENVNERAISKIIKDAGIEEATGYFVGKLLMKATDDFLRTKKCDFRTLCRVLKMFKEDTVDAQYEHFADGLMTTSCGAMDLVKEYAVNIAMNKIMQKDSSFKELFEVTKEDYVFKTIKKATFTDPRDGKVYKTVKIGDQIWMAENLAYATKGSKIYGEGESKTEIQANEEKYGRLYDWETAKKACPPGWHLPSEKEWQILVDFTGDKKTAGKKLKSKSGWEKTGRKSGDGTDDYGFAALPGGIYANGLSA

SEQ ID NO: 106023 - protein, 294 aa, Unknown
  Obtained from environmental sample
  misc_feature (1)..(294): Xaa is any amino acid
SPYTTLYRNQCGISALGTGFGKTATGVALMSLLIQEAKAHRMFLQVPNNKIKDWIEEIHSVMPSLKIASIDPEEPGYSSRDKRYAKYQAMARSDADIILMPESSASEIQLSAENNARITEKVSMLYKMEKADSTARKQEMAALKGEYKADSGKTNVTVCFEDFGCDAIFVDEAHRYKNLFSSSLSRETGMNDGRQSAKAMSLYKKCEYIREQNDNKNVYLLTATPLTNSPLEYYNMMQYVAPEELRRMGILTIDGFIREFANIEQGWLYDWGSGQAKTGNILTGFKNLFTLQNL

SEQ ID NO: 106024 - protein, 148 aa, Unknown
  Obtained from environmental sample
  DOMAIN (46)...(148): Glycosyl hydrolases family 38 N-terminal domain
  misc_feature (1)..(148): Xaa is any amino acid
MTHQITRRDFICKTTVGTAALALTPVSGILAHSVITPWPKDAKKYTFYMIGHAHIDPVWLWPCSEGVSVVHSTFRSALDRMKETDGFVFVASSAQFYQWVADNDPAMLEEIKQRVKEGRWNVVGGWWVEPDVNIPSGEALVRQGLYGQ

SEQ ID NO: 106025 - protein, 263 aa, Unknown
  Obtained from environmental sample
  DOMAIN (13)...(48): Sel1 repeat
  misc_feature (1)..(263): Xaa is any amino acid
VKWYRLAAEQGFPEAQFYLGRAYDEGKGVAQDKAEARKWFRLASWLGHADAYKALGHIHHSSDSPENNQFEAVKWYLLAAGQGFADPQYKLGEAYWFGHGVAIDNAEAVKWFRLAAEQGNAEARFYLGRAYDEGKGVPEDKAEAVKWFRLAAGKGNAEAQFYLGRAYDEGNGVAQDKAEADKWYRLSAEHGFPDAQYKLGEAYWFGKGVAQDKAEAVKWLRLAAKKGNAKARFYLGRAYDEGEGVAQDKAEADKWYHLAAGQG

SEQ ID NO: 106026 - protein, 264 aa, Unknown
  Obtained from environmental sample
  misc_feature (1)..(264): Xaa is any amino acid
ASWTVKDLLEALATHSEGFDLTYFAWADCPFIDPELAKRLSDRHLRYAAEYSYADGWPYGIAPELLSPGTAAILSKILKNDDNGPVERDSLFSVIQKDINAFDIETEISSVDLRCHRLRLCADSKRNLLLLRRFTQNGVPDTAAIERIIAEKPEILRTLPAFFPVQVYGGCTQACAFCPWPKTGNNTANSSITERRDYMEAGRFDSLLEKIVSFSGDAVIDLSLWGELSLHPQKMELIEMVLRRPELDLIIETSGIGWKDNELD

SEQ ID NO: 106027 - protein, 125 aa, Unknown
  Obtained from environmental sample
  misc_feature (1)..(125): Xaa is any amino acid
MPILIVAACEPGRGGGHLVRSMTLVCELRALGREAWLYVTSSNADAVLDTAQFDRAWLLAETGLEEKSWQCIILDRFQTPADELIRWQRIAPVIGIDEGGKHRGCFDFLIDILPNCNRVAPNISA

SEQ ID NO: 106028 - protein, 227 aa, Unknown
  Obtained from environmental sample
  DOMAIN (159)...(224): His Kinase A (phosphoacceptor) domain
  misc_feature (1)..(227): Xaa is any amino acid
MPGERRKKIVVVDDNPEELNSIKNTLKDIYMVYPSPSAQDMFELLEHVQPELIILDVEMPEMNGFETIEKLKKSEKYREIPVMFLTSIDDTQSEMKGLQLGAVDYIRKPFVTPLLLQRIKIQLSIVEHQWEIIDLLELKTQEVKLREMAERTAQDASHAKTNFLSRMSHEIRSPLNAVIGMINIANEEKDIASLKAYLLKAGNAAKLVLTVINNILDMSKIEANKLS

SEQ ID NO: 106029 - protein, 268 aa, Unknown
  Obtained from environmental sample
  misc_feature (1)..(268): Xaa is any amino acid
AVGGVLVGFMTKEEAQQAVADMIAVLYPPNMHQTIMNSFSLAPNANDPAYWENIRKGLAMQQASAATQGAPQGDWRVEPSDGGVAAGGGVVITEYKGKDTAVQIPSQIDGKPVVGIGEKVFSRKGISSVTIPDGVASIGAKAFADNQLSSVTIPDSVTAIGEEAFVRSQLSSVNIGGGVTTIGKAAFALNQLSEMKIPFSVASIGAEAFRKNQLASLSLGGGVVTIGDQAFAGNQLTEITIPNSVKTIGRDAFADNQLAKVVIMQPDI

SEQ ID NO: 106030 - protein, 83 aa, Unknown
  Obtained from environmental sample
  misc_feature (1)..(83): Xaa is any amino acid
DTPRRFVPQKNLVEILDAGGVRRECSENFLERFDTAYVNEVQEFVDCIVEARKPEVTVYDGTRVSEIAYTCKAAFESGELIKF

SEQ ID NO: 106031 - protein, 178 aa, Unknown
  Obtained from environmental sample
  DOMAIN (2)...(27): Bacterial regulatory proteins, lacI family
  misc_feature (1)..(178): Xaa is any amino acid
MVNIKDIARQVGMSPSTISRVVNGKKHVNSEKREQILKLIEEYGYVPNRAARSMVLKRNFTIGIIIPDTFNIFQRQLFSIIERYLESFGYHTLFFFVKFEDQSEEICLNRLKAEKPDGVIMIHEIKTPFFYEYIKKTGLPAVTSTFHYPGINAIHVNEEQASRDAVNHLISLGHRRIL

SEQ ID NO: 106032 - protein, 231 aa, Unknown
  Obtained from environmental sample
  misc_feature (1)..(231): Xaa is any amino acid
MLLNKALFEADRIIATGSVEPHYFAGFTGGRKAFLPGIASYKTIEANHKLALSPKARSLVLEGNPVHEDMMDALPLIKAPVFSIMTVLDKDQGIAAVSAGDLMASFYRAVDVAKQIFCVSVPSKADIVVSVAKFPMDIDLYQSQKAIDNGAVALKDNGFLILVSSCRDGIGDEAYANLLTQASNPADAIEKIRASYKLGYHKAAKMAEVSGRATIVAVSELSGERLNSMFM

SEQ ID NO: 106033 - protein, 280 aa, Unknown
  Obtained from environmental sample
  DOMAIN (1)...(141): tRNA synthetase class II core domain (G, H, P, S and T)
  misc_feature (1)..(280): Xaa is any amino acid
LWIESGRYDSFDSLAKFKGRGGADYVLNPTHEEVVVDFVKTILGSYRQLPFMVYQIQTKFRDELRARAGLIRTREFIMKDGYSFHATQGDLEKYYDRCLDAYAKIFKRCGLRNVVSVASSTGAMGGKVAHEFQVVSDIGEDTIYLCGCGFNTNKELIDGDDATCPKCGAKMTEKRGIEIGNIFQLGDRYSTSMNLAFANADGDRTHPIMGCYGIGVGRTLAAIMEEGADENGPVWNMETAPFHVHVISLGKTAAEAERIYGELSAAGIETILDNRDARAG

SEQ ID NO: 106034 - protein, 139 aa, Unknown
  Obtained from environmental sample
  DOMAIN (1)...(132): Predicted permease
  misc_feature (1)..(139): Xaa is any amino acid
MMETMNTIAGFMKMLLIAIASVSLLVGSIGIMNMMLVSVAERTREIGIRKAIGAKERHIVTQFLSESILISFIGSMIGLVVGITLAQVIGRFVLEFNVPLSIWAPVMSVVVAIVVGIASGVMPALKAARMNPLDALRHE

SEQ ID NO: 106035 - protein, 112 aa, Unknown
  Obtained from environmental sample
  DOMAIN (1)...(112): Short-chain alcohol dehydrogenase
  misc_feature (1)..(112): Xaa is any amino acid
MIIKPMVRNNICLNCHPVGCNVSVQRQIEYAKKNLLKVEGKTPKLVLVVGCSTGYGLASRISAAFGYGSVTVGVSFEKEPNEKQTGTPGFHNNAAFDREAEKAGLVSVTLNG

SEQ ID NO: 106036 - protein, 83 aa, Unknown
  Obtained from environmental sample
  DOMAIN (7)...(52): SpoVT / AbrB like domain
  misc_feature (1)..(83): Xaa is any amino acid
MYHVNVTKWGNSLGFRIPSGIADSLGIRAGDKLEVARAKGGLLLKKATPQNKHYALKNILDSFAASKAHPEIDFGEKCGEELW

SEQ ID NO: 106037 - protein, 113 aa, Unknown
  Obtained from environmental sample
  DOMAIN (7)...(111): PemK-like protein
  misc_feature (1)..(113): Xaa is any amino acid
VNPAPPRQGEVLWLCLDPALGHEQKGRRPVLVVSATLFNSHSGFCWVVPVTSHQKGLPSETMLPHGLPVQGALLLSQMRSIDWRARPFSVAGLVQPDFLDDILARLSAVLEPE

SEQ ID NO: 106038 - protein, 270 aa, Unknown
  Obtained from environmental sample
  DOMAIN (90)...(270): MutS domain V
  misc_feature (1)..(270): Xaa is any amino acid
TNANLHLVPQHFIRKQTLVGGERFTTKALLEFEQKLSSAEADRQRIEEKLFKSLIGTALSYGEQLKALSAAIAHLDVCCAFAEKARTLCWVRPELSDGSELQLTGARHPMLEARLGRNCIPNDLELNPSAPIAVVTGPNMGGKSTYLRMAALLVVMAQIGSFVPAEAMRFGLADRIFTRIGASDYLAKGMSTFMVEMTESAKIISQATSSSLVILDEIGRGTSTKDGLALAEAIALHFRDMEGGGPRTLFATHFFELTQMAADPRIVNLH

SEQ ID NO: 106039 - protein, 211 aa, Unknown
  Obtained from environmental sample
  misc_feature (1)..(211): Xaa is any amino acid
MRNNLFKLIFLAGVYASLLFSWTPEIEPPPLPPVQENPISPSPKGWNYWVYPKIQRCYSGSYSACPGIGGKLRNDCPYSNSNPGQSSSAGELGGNSSSSQAEQGNSSGGMAQEYEYCVFAAEKKCLSGSLTLCPPGGKLSNACPYNSSSSKQSSSSSVAGSSSGGIAVSSSSQGIKSSSRSQAIGQANGNVFTDTRDGKKYKFEVATDGKI

SEQ ID NO: 106040 - protein, 226 aa, Unknown
  Obtained from environmental sample
  misc_feature (1)..(226): Xaa is any amino acid
MGSSNVVNSSPSVPSSSSTTSNPNPNIVYGTSVTHGGETYKTVVIGSQTWFQRNLNIFAEGSRCYKDDPANCTTYGRLYDWQTATTLCPSGWRLPSNADWDKLFHYADGTSGTQPGAESPYKSPTAGRYLRATSGWNMCGNGSSYTYKCEDTFGFSALPGGHNEDKDGFYSVGSSGYWWSNSEYISSSGYDSGEYVYRIRMKYDKEDVSYPASNKRDLLSVRCVKN

SEQ ID NO: 106041 - protein, 286 aa, Unknown
  Obtained from environmental sample
  DOMAIN (1)...(230): tRNA synthetases class I (E and Q), catalytic domain
  misc_feature (1)..(286): Xaa is any amino acid
DRGYYCFCSAERLEKVRKEREASHSSESGYDRFCRNIPREEAARRAKAGEAHTIRLKIPLGEETPEGKSASVTKFYDHIVGNVEWKNEDVNPDPVLLKSDGFPTYHLANVVDDHFMGITHILRAQEWLPSVPLHVIMYNSFGWEPPAFCHLPMVMGQDGKKLSKRHGSTGIDEFRKQGCLPEALINYIALVGCSYEEGKDIYTLEELAQRFSLEKLAKAPAIFDYKKLEWFNGQYIRRKTNTELAALSLPLAIEQGLFGSPSHKPDPAQETLYIAAMPLVKNARYF

SEQ ID NO: 106042 - protein, 86 aa, Unknown
  Obtained from environmental sample
  DOMAIN (11)...(74): Exonuclease VII small subunit
  misc_feature (1)..(86): Xaa is any amino acid
MATKKTGGTKKTFEERLERLEALGDEIRKSDIPLDDAIKAFEEGIILAKNLEKDLEKIESRIEILMNSDEAASDEDPELGLFDEEE

SEQ ID NO: 106043 - protein, 195 aa, Unknown
  Obtained from environmental sample
  DOMAIN (27)...(99): Surface antigen variable number repeat
  misc_feature (1)..(195): Xaa is any amino acid
MKKTLIAAAPFFLLIVALGGVVGAEAKVLSAIKIEGTLVANPDAVSDAILLKPGSDFTPGDLQESVRRVYKLGHFRNVDFFVDEEADSSVSLKLVVEEFPIVDKVEFSGNRKIKRKALEEKKLLRFFAPLSDAQLHKSKQTILDMYAEKGYLLAEVDAQVIATSVPGNVIVKYVIKEGPRVRGQSIVFQGNRDVK

SEQ ID NO: 106044 - protein, 269 aa, Unknown
  Obtained from environmental sample
  DOMAIN (140)...(178): RHS Repeat
  misc_feature (1)..(269): Xaa is any amino acid
DNGIRLSAVWLTHDPEYPENLPAAPLVRYGWTPRGELAVVYDRSGKQVRSFTYDDKYRGRMVAHRHTGRPEIRYRYDSDGRVTEQLNPAGLSYTYQYEKDRITITDSLDRREVLHTQGEAGLKRVVKKEHADGSVTQSQFDAVGRLRAQTDAAGRTTEYSPDVVTGLITRITTPDGRASAFYYNHHNQLTSATGPDGLELRREYDELGRLIQETAPDGDITRYRYDNPHSDLPCATEDATGSRKTMTWSRYGQLLSFTDCSGYVTRYDH

SEQ ID NO: 106045 - protein, 279 aa, Unknown
  Obtained from environmental sample
  misc_feature (1)..(279): Xaa is any amino acid
LPASYPTTDFYGVPITNGAAAGAVQGNVSGTGYYLELSADDSTKGSVSASPALNADGIVSGLVTFTATPAQGYALAYWLVNGNNQGNTSPLQLNVTEHNTRVQAVFGINVDNFTDSENSETTPGTLRYALANAIAGERIILTNVQPGQTTIALRSRLNITRNIIIEGNGVTLTRDAAWTESASSQLLYVSGTSTTVTIRRVWFKDARATQYGAAVYNSGGNVTLESCIFSGNRNSSTSSTYGGGAIYSTGTMNVKGCTFYGNSADYGGAISRNGGTLTL

SEQ ID NO: 106046 - protein, 221 aa, Unknown
  Obtained from environmental sample
  misc_feature (1)..(221): Xaa is any amino acid
MSEEKTTNTKADKISRPIGAKLIIIITILLLFSLGAITVLVSVLVSNDVQVTAEDNNFTTNRRSASEAESFLVKVRSNALVLLDTLNALGETSPVASLAAGFFFERNQDFAFIGIGQRQTDGFTLTRSLINERFFLSNELEPGVTGNFIAVEEDALERCIMGETLLLNAAPVFGIPVLALVFPWQEAGEQEIAIVFFSSNTVTENFGGGVNISFMINDAGD

SEQ ID NO: 106047 - protein, 290 aa, Unknown
  Obtained from environmental sample
  misc_feature (1)..(290): Xaa is any amino acid
IQNDDIIRFPESFGGLSSLEELAISGNLAPLPESFGSLRSLKRLSLRFWVFKENHHKGTSWGGQAYTVNDFCALPESFGGLVSLEYFSIDGGNLKTLPESFGNLAALKTFSIENSRLESLPDSFGNLGNLESLSIDNGLKEQNAPLALPAAIGKLSKLKSLVIDAALQPIPNWLGGLTSLTKLTITSDTITGLPCSICNLPSLTKLIIDCDNLAALPDNIGDLKSLKGLYVNSEALKTLPDSVGSLSGLDTLRIEGSSFSNLPESIGNLSSLTKLYLYRAKIKLCQKQLA

SEQ ID NO: 106048 - protein, 92 aa, Unknown
  Obtained from environmental sample
  misc_feature (1)..(92): Xaa is any amino acid
AADYITLIDHGRLFYSGKTSDLINSYLIVRGSPNILSAELEKSIIGLTINQSVFVGMIKSPMSQNIPKDIVSGIPSIDEILIYISKGTYKYE

SEQ ID NO: 106049 - protein, 249 aa, Unknown
  Obtained from environmental sample
  DOMAIN (1)...(148): MatE
  misc_feature (1)..(249): Xaa is any amino acid
MADTYFVSSLGTSQVAAVGIAFPLMAIIQAMGFFFGQGSGNYMARALGAQDNENASRMAATGFISGFVFMAFLAAIGLAGLGPLINGLGATETIKPHAREYIMYILIASPWMVAATVLNQQLRFQGSAAIAMVGMLSGAILNIFLDPLFIFVFHMGVKGAAIATMFSQIVSFFLLLCYGSTRKGNIPIRFSHFSPSLKRYAEMFRGGVPALLRQGLSSAATIVINHFAGAYGDAAIAAISIVNRLCMFA

SEQ ID NO: 106050 - protein, 262 aa, Unknown
  Obtained from environmental sample
  DOMAIN (1)...(262): Receptor family ligand binding region
  misc_feature (1)..(262): Xaa is any amino acid
RTGNCRHRSDKVEAANAMQRLVDRDKVNVVLGSWGSSLSMSGGEVSRGKVPAIGLSCTNPLVTAGNDWYFRVCFIDPFQGTVMASYAFNDLKARTAVIVQEISNDYSVGLAKFFVDTFVQLTGNPNAILATVNYNTGDQDFSAQLTTVRAQNPDVIFAPGNYTESALVIKQARELGINTPIIGGDTWETPEFIDVGGDRVNGSVFSTFFAAEFAGTPQAKTFLEEYTKQYNKEPAAVTALGYDGYLVALDSIKRAGSTDPAN

SEQ ID NO: 106051 - protein, 108 aa, Unknown
  Obtained from environmental sample
  DOMAIN (56)...(89): Tetratricopeptide repeat
  misc_feature (1)..(108): Xaa is any amino acid
MFKHFLTIVAFAGVFVFAQNPQSLRLKQAGELANQGRHKEALDEYKAVLSIDKSNAEAYLGAGDARLKMKDYKLALDNFQLAQKYNPKLTKAIEGEAEAYEALSQKEN

SEQ ID NO: 106052 - protein, 166 aa, Unknown
  Obtained from environmental sample
  DOMAIN (5)...(138): KilA-N domain
  misc_feature (1)..(166): Xaa is any amino acid
MGKKETVNVQGREIAIQQNANGDYICITDIAKFKTAEPNAVIGNWMRNRNTIEYIGVWECLYNPNFKPLEFEGFRKEAGLNAFTLSPQKWIEKTNAIGLISKSGRNGGTYAHKDIAFKFASWISIEFELYLIKEFQRLKEEEQKQLGWSAKRELAKINYHIHTRCY

SEQ ID NO: 106053 - protein, 227 aa, Unknown
  Obtained from environmental sample
  misc_feature (1)..(227): Xaa is any amino acid
MAVIIVGDFDTAYLERTLTEHFHNLWPESGDFNRPLYDLSAQKEGSFQTLILTDSELPRSSIYLYWKQKTEKRQQDLADYRESVIDYLASIMLYLRFQEETEKSETPYVYGGAGWANYGYSSRFYALVAQAKTNSVRASLRELLLIKESLFRYGFTQGETYIAKAALISEMEHMVAEKDRQNSNNYVNAFTQHFLTGESVPDVEWELNAIELLLPGITLEEINERGK

SEQ ID NO: 106054 - protein, 245 aa, Unknown
  Obtained from environmental sample
  DOMAIN (105)...(245): Thiamine pyrophosphate enzyme, C-terminal TPP binding domain
  misc_feature (1)..(245): Xaa is any amino acid
MDIKALEKTALSVRALSIDAIEKANSGHPGLPLGAAELGAILYGELLRHDPSDPAWADRDRFILSAGHGSMFLYSLLHLSGYKDMTLEQIKNFRQLGSRAAGHPEYGMAAGIEATSGPLGQGLAMAVGMAVAETMLAARFNTPSRKIVDHYTYALCGDGCLMEGVASEASSFAGHNGLGKLIVFYDSNKITIDGSTDIAFTEDVAKRYEAYGWQVLRGSMYNFEEIAKLTAQAKAETKKPSIIIL

SEQ ID NO: 106055 - protein, 158 aa, Unknown
  Obtained from environmental sample
  DOMAIN (21)...(158): ArgJ family
  misc_feature (1)..(158): Xaa is any amino acid
MSDLKCVIKKIRGGVCAPKGFVAGGVHCGIRAKSKKLDLALLYSEKPCAAAAVFTTNKVKSACVLVSQEHVSGGVLRAVIANSGNANACTGEGGLAVARKMASLASGLFGISPKEVAVASTGVIGVPLPIEPIESSMEDLRNSLRDDEEGHLTALKRS

SEQ ID NO: 106056 - protein, 85 aa, Unknown
  Obtained from environmental sample
  misc_feature (1)..(85): Xaa is any amino acid
VEIQFIPEAEKDYKSLDGSIKKLVNEKIDNLRNDAYIGEELGNKNNIDLTGFYKIYVAKKKYRIIYRIVKDVIEIIEIWGIGKRD

SEQ ID NO: 106057 - protein, 255 aa, Unknown
  Obtained from environmental sample
  DOMAIN (64)...(146): PPIC-type PPIASE domain
  misc_feature (1)..(255): Xaa is any amino acid
MIFLQRDLYKQVTEPDPKRFEKMDAARASMTNAAELQAELERLANATISRRIRKTDAEMGDYEVELQIEAENLAKKVKESGVDFAEVAKKSSNHFSATNGGLIGWVLPKQRDFPVLVNRAIRELPEGGISEPVNTESGYYIVKMNGISKVRNSTLKRYFRDPAKAASMQDALWFAAVWDYIDKTVQQESGKAIKINYEGLASDDTNTVLLAIDSPQYNKEVTLGNLLYDLDYTSPPRRAQQYGLIRTTLHINDYN

SEQ ID NO: 106058 - protein, 157 aa, Unknown
  Obtained from environmental sample
  misc_feature (1)..(157): Xaa is any amino acid
MNNERITEDIVREHFKKDANFSNIVIEEQKSNNRKIDKLLKNASKNGNGDGRPEFIIQFNENSDLLIIVECKANMKKHISTSGDKYKDYAVDGVLLYSSFLSKEYDVLSIAVSGDKTNLKISHFLQLKNSKTVNSIFNDDKLLSIEEYLSGYQTDER

SEQ ID NO: 106059 - protein, 275 aa, Unknown
  Obtained from environmental sample
  misc_feature (1)..(275): Xaa is any amino acid
FAGRIYQPTIDSFTFDGKPYAFSVGVNLNNFEALFWNKRLFREAGLDPNLPYDMQKAGTWTWEEFLKICKRLTRDTNNDGKMDTYAMAADLSTEILDAITSSNGAQYVDKDPKTGKFVNATNRPEFLEALQFAIRLQTEGVLKPRPEGSNWDWYKSEFIDGRVAMRVDESYVANSSSVELDKMKDDWGMVLFPRGPKSPTVRAYSRDNLMVIPATYKPAEVEKILWAVALWNTPADNNWKAGQYNFFRDPRAVDETLALVRDPQIAMIKYFSYIN

SEQ ID NO: 106060 - protein, 271 aa, Unknown
  Obtained from environmental sample
  DOMAIN (90)...(172): Bacterial Ig-like domain (group 2)
  misc_feature (1)..(271): Xaa is any amino acid
CAVTVVDGIAVNVSPNTVTLPTGGTQTFAATVTGGTGNTAVTWSVSAGGGSITGGGTYTAPATAGTYTVTATSQADTTKSGTATVTVVVPVTGVTLDKATMALTVGGAAGSLAATIAPSNATDKTVTWASSAPGVATVSGSGLNATVTAVANGTATITVTTADGSKTATCAVTVTAATVPVTGVSLNKTALALTTGGEEQLTATIAPSNATNKTVTWSSSNTSVATVTNGLVKAVAAGSATITVTTQDGNKTATCAVTVTASTVPVTGVTL

SEQ ID NO: 106061 - protein, 275 aa, Unknown
  Obtained from environmental sample
  misc_feature (1)..(275): Xaa is any amino acid
TYRLRNFCARFFNPDEYAHIRVFDDRKQGTFKGVKLRCEAGKIGSLAETLHKHNAQNRGIFFVVNCGGDSDAEITRINAVFVENDSLSIDGQIQQLESFALPPSLMVRTAKSVHAYWLVKDVEVRDFRRIQKKLIAQFDGDASCVNESRVLRLPGFNHCKGEPVMVECIKFAPELRYTKAQLEEVLPQIPDEPETAAGGTVSAPKGNRRGLALAGKRCDFIQHCKENAATLPENLWYAMISNLAVFEDGERAIHALSKPYPKYSYPETHAKIAHF

SEQ ID NO: 106062 - protein, 74 aa, Unknown
  Obtained from environmental sample
  misc_feature (1)..(74): Xaa is any amino acid
MIKKKNEIEGKVHTNLRGGIGDVTFFHFLTEQEAKGAGRLFAKIVIEPGNSIGLHKHEGDTEAYYILKGKALLS

SEQ ID NO: 106063 - protein, 168 aa, Unknown
  Obtained from environmental sample
  misc_feature (1)..(168): Xaa is any amino acid
MLFPIIELLVNRLVSKNHFDDFKSFLSEADVPSNITFRKMDNQTRIFFEYETEQSNTSLIDFFTNCSTGMKSLTVLFFWLQNEIFNEKLPSFIFIDEFDAFYHQDLSEYVVKVIKKINDCQFILTTHNTGVMSNDIMRPECLFLMNKNKIKSLSSLADKELRFAHNIE

SEQ ID NO: 106064 - protein, 157 aa, Unknown
  Obtained from environmental sample
  misc_feature (1)..(157): Xaa is any amino acid
DNCTSLANITIPDSVTGIKGGQGWDYEKGAFQNCTSLTSVIVGSGVKNIGTAVFQDCTSLTSVNIPNNVTEIEFRAFSGCASLTDITIPGSVSTIGLNAFGNCTGLTSVTFQGTMGVGNFGLHVGAFNGTGDLVNKYGGKNIGTYTRPGGSDTWTKQ

SEQ ID NO: 106065 - protein, 268 aa, Unknown
  Obtained from environmental sample
  misc_feature (1)..(268): Xaa is any amino acid
MSLQGLRDASEKVWAKILMGILVFSFVGWGAANWLLGETTVNNSLVRVGSESVSLGEFEQERNRQLAQMGRDMQKKMFLDKHTYNYFNRQILSNLATRMLLEQHAANIGLVVSPIAIANIIKGSPEFWENGAFSTDRFDFVLDMNGITEKYFTDTLRREQLREMILGSLSNVLPVPNFMTESVYNSREALRKIEFSTVRFDAFPANGNPTEDNLREVYMKHPKIVPEYRTVSYVMVGRNMAKPDSYERGYDTARSIEDMLVAGDSCAT

SEQ ID NO: 106066 - protein, 183 aa, Unknown
  Obtained from environmental sample
  misc_feature (1)..(183): Xaa is any amino acid
WNIYQNVFNKDYRIEIPSGSKKISLEITDGDWMTINDLKFSPVEKTAAGGNFSLTPTVIDWGLEIPPVKIDANGRIIVDNKYIQNREWLKKTNIKPWDELIKNNGGAMVGEWGAHNKTPHDVVLRWMEDNLINFKEAGLGWALWNLNGSFGVLNSGRDDVNYENFNGYKLDRKMLSLLQKYID

SEQ ID NO: 106067 - protein, 274 aa, Unknown
  Obtained from environmental sample
  misc_feature (1)..(274): Xaa is any amino acid
FVELKNKFEEICGDCESEKIISVFPEKILSSSEEAPDTAWNRFFEEISLSEDIVETTLPSKFLRGHKTYKKESFPNSSALENNFSPRKFIIEHEESSGIYSKMIFTNVLINQLKGDKARKLSAREELWQAQDSNLFSPGNGYIRNELRKSAYSSLLRAEMLTREMGKFIPSLIQYDFDFDGIKEFIFQDSVINCYIQPKGAGIFELDYLPKEWNYLDCGSGDFGRRMAFADILLPLDTNIDKHEDAITEDTRLCFNEEYEFIAQDKKGKICFKL

SEQ ID NO: 106068 - protein, 269 aa, Unknown
  Obtained from environmental sample
  DOMAIN (138)...(247): Region found in RelA / SpoT proteins
  misc_feature (1)..(269): Xaa is any amino acid
MNFAKISRLFATNKTILEAENIRNMLLALTDDIRVILITLAEKLYLLRMPDSIPEEKRKGFAQECLDIYAPLANRLGISRIKDELEDLSLKYLNREVYQQIKDIVSAKRTEREKFLSEARETLIMEAEKAGIKITVSSRAKHFYSIYMKMRKRNKSAEEIFDLFGIRIICETVEQCYNLLGIVHNLWKPGSGRFRDYIANPKSNGYKSLHTTVIVDEWLLEIQIRTTEMHYLAENGIASHWLYKKGSSHEQVQLSDISTVNKLRNWRHN

SEQ ID NO: 106069 - protein, 248 aa, Unknown
  Obtained from environmental sample
  misc_feature (1)..(248): Xaa is any amino acid
MTAVTGENSSLKNALYEHIFNEKNNIINNTTQKLDIYFHDKTNEEMNKLTAIEQNIKSRIKQIKSFLEQNNIDIKNEFNSKLDELSDLLDKKVTETQASAKAGALLEEERKQLNALKNEEISDEQIRAVAKKNNLERFIGLNVLNVIGIFLLFVGAVTAMRYTYLKLSDIFKGIMIFVLGGLMLVAGEILNRKKPNVFSLGISAGGIAILYAALAISFFVLHILGMYPAIAICVLLTVGAFVLSNRYN

SEQ ID NO: 106070 - protein, 278 aa, Unknown
  Obtained from environmental sample
  misc_feature (1)..(278): Xaa is any amino acid
VKNIVPLHIKKNYYGYLEYYTLKIAQADIFTKLQKLNEMFIKETLEKYKELFDNTDGKSLDKQQRMAIVTDELHNLIIAGAGSGKTLTILGKVTYLLKCGISPQEILLIAFTRKSAGELEERINRNLALGIKAQTFHKLGLDIITSNNKERPDIDDNFDTYLEDYFSKELIQHQDDVQIFLEFIGYYLNIPIELKADGTLGEKIEKEKNADFETLGEKYNRITTGEKKTIKGERVKSLEELIIANFLFLNGVEYEYEREYPHQSDDKTGNDIDPILYQ

SEQ ID NO: 106071 - protein, 158 aa, Unknown
  Obtained from environmental sample
  misc_feature (1)..(158): Xaa is any amino acid
TAFFLGLAARSVTLVNYKDVFPLTPENAGRVLLAGNYSDFITYGRKAFPGAVSYWYDTSQAIPDIVPYARSVDTVIFCLSNKAGIRIVQQLRSLNKRVIVFSVLSPAYLDEVSWVDGAVAVYSYAPESFIAGFSAIIGRIKGEGKLPFALNMDPLSGN

SEQ ID NO: 106072 - protein, 234 aa, Unknown
  Obtained from environmental sample
  DOMAIN (5)...(191): PHP domain
  misc_feature (1)..(234): Xaa is any amino acid
MAYLYETHLHTKEGSSCGVSGGSEYVRKYLDLGYTGVIITDHFFNGNCRADRNLPWKKWVQEYFRGYELTKEEGLRRGLDVFFGWEETLDGDDYLIYGLDKEWLLAHPEAAIWTPEEQYDEVIRYGGCVVLAHPFRFANNVNRGAFRRNVYVSAVEVANSGNSQISDALAWAYANKLKVSATAGSDIHYAADIRRETVFGVYLDKKMETIADYVDAVLNNTIAKLKVPKGRFDF

SEQ ID NO: 106073 - protein, 266 aa, Unknown
  Obtained from environmental sample
  misc_feature (1)..(266): Xaa is any amino acid
DSLGYSAEPYEFFLDAGDNVIRLEGINEPVAIRAISLKAPVPAQNYRQYAQGIDTDKFRNTVSSYRLRIQGEDARYRSDPSLYAIYDRSSGATNPPSVAKIRLNMIGGQSWRVAGQWIEWDFYVPEDGMYRFTVKGRQNYNRGFVSNRKVMIDGQIPCMELSAVPFTYSNKWKLVTFNDDQGDMLFPLEHGAHSLRLQVAMGGMGEMLSVMEESVFRLNSIYRKILVLTGTEPDIYRDYRVDVVYPDIIKAMDLESKILYKLVDDL

SEQ ID NO: 106074 - protein, 259 aa, Unknown
  Obtained from environmental sample
  DOMAIN (3)...(258): Putative modulator of DNA gyrase
  misc_feature (1)..(259): Xaa is any amino acid
MLYGTEVLYGFTSDNSEEVLMNIAKNLSLSKNKKGEANFGFGKEENYISYIKDNFKDPRQLGQQYKKDFLFAANSSARIDSKIVQVEASIADAEQKINIWNSSGLQVCDNRVRTRFSVNVTAGENSERASAHEGPGALGGFEFLDNLPVKELATSCAERALRMLKAPYIKGGQMPVIMGNAFGGVIFHEACGHPLETESVRRQASPFCGKLGEQVGQSVLTAIDDGTLKGVWGSLEIDDEGTPTQKTVLIENGILKNFL

SEQ ID NO: 106075 - protein, 150 aa, Unknown
  Obtained from environmental sample
  DOMAIN (1)...(145): Glucose inhibited division protein
  misc_feature (1)..(150): Xaa is any amino acid
SRVADVGSGAGLPGIPLAIALPDSEFTLIERKGRRSGFLRDTLAALANKNYRLSNVSVEEQEMEKVKPHRFTMVTFRAFKPLDPKILKKLFRLCVDGGVLAAYKGRQSKVEAEMAELERQMPNQTIRWELIPCPVPMLDEERHVLLINNK

SEQ ID NO: 106076 - protein, 67 aa, Unknown
  Obtained from environmental sample
  misc_feature (1)..(67): Xaa is any amino acid
NVPALWDETIPFSGNMDAIVLGPDECFVVSDDRSNTNDSRTWGPVSPSLITAKAILRFWPPVKFELY

SEQ ID NO: 106077 - protein, 179 aa, Unknown
  Obtained from environmental sample
  misc_feature (1)..(179): Xaa is any amino acid
MDLFIKAVIGDVKYQIDYFNVKEIRTVYIGGGTPSVLGSKRLRVLLDALNALSGFSPVEFSIEANPESVTDEFLSVCREGGINRLSLGVQTFNESSRLAVNRRGQVHLLERRLGLVSDMFPGAFSADLITGLPYQNEESVKEDVKRLLAFNPAHVSLYSLTVEAMTPLEKKIKTGIVSV

SEQ ID NO: 106078 - protein, 245 aa, Unknown
  Obtained from environmental sample
  misc_feature (1)..(245): Xaa is any amino acid
MEVYDLLRSEAGRELFTGKLLSYSGLIISDEDNDGYYESRSFFNAGVVCKFDFDRKQENAFDIQVSFSADGVPVSAEYPVTGTVQAAAVVWERYPSVRQAVLAQEKFIFPQGDFQFAPVSFISLGGSKNRSGLLIPILSQNSELTRRSMVSFCTSITRPSIEFNGAVEQVFFQQGFPWQAVEILNGNNLSVTEFEKGIPVIQYIDLDLDGRMETIRRFHRPGPAFPWPDSEYTFDYRRLVASSES

SEQ ID NO: 106079 - protein, 277 aa, Unknown
  Obtained from environmental sample
  misc_feature (1)..(277): Xaa is any amino acid
EKDDFENPVYGRIFEAIWKQFNDKERRITPTLLTLGQEPDISLEALAEINVISDANISWYEDRIFEESKKRLFIKALKLANEEINSNTDTDTVIKNLMPELAAVTTARNEAGIKSAAELLKMQFPEIRWIIKGLIGEGLTMINGAPKIGKSWFVLNLAIAAASGTYFLGELPATKTGTLYLALEDTERRIHSRLKKLKAPETDNLKITTLWRDGYIGLENYLKANTEIGLVIIDTLARFAHIEDMNDYTMTTTAMARLKRIADDLNVAIILIHHAKK

SEQ ID NO: 106080 - protein, 210 aa, Unknown
  Obtained from environmental sample
  DOMAIN (4)...(208): Pyridine nucleotide-disulphide oxidoreductase
  misc_feature (1)..(210): Xaa is any amino acid
MQYDTIIIGGGPAGYLAAERLGHHKKKILLIEEKHLGGTCLNVGCIPTKTLLNSAKLYVHAKEAEKFGVKAEGLSYDWSAIQNWKAEVITKLRGGIESQMKRYGVEVINGRGEILSAPSGERAAKVRVVTPNGNTEHEGKTVLVSTGSVPVLPPIPGAKDNPRLVDSTGLLAVESVPKRLTVIGGGVIGVEFAGLFSALGTEVTVIEMMD

SEQ ID NO: 106081 - protein, 177 aa, Unknown
  Obtained from environmental sample
  misc_feature (1)..(177): Xaa is any amino acid
MLILMAQTPLITLLLGFVYTLSISLFPMSFYFCLAVTGIWVGGLDAVREVASELPLLAREVRCGMNRWAYIVARIAVAAVLSAAQAALFTASAVAIFRNLEFSLPLLVLLYAAVFAGNLLGLAVSACSGGEGRAISTLPVVLIPHIFFSGMVVQFEYMAELGREISRLTISRRVVGV

SEQ ID NO: 106082 - protein, 211 aa, Unknown
  Obtained from environmental sample
  misc_feature (1)..(211): Xaa is any amino acid
MKYKFKTVKFIREIIKNPNGALSAAAGKNRVYYLAVKFAVFIRLIVSEYIQNHCTSRASGIAFVLLITLIPLIATAALLLASIAEITPHHVERAVTAVLPFSPPTVVGYILEFFQNARGLKGIGIAVLIITAMGLFNIAEQSLNAIWKVGIVRPFFHRLRTFTMVVVYSPILFFVSFQLRHSGFFGLLPRDFFLTPLPPVIFTALAFTVMF

SEQ ID NO: 106083 - protein, 164 aa, Unknown
  Obtained from environmental sample
  DOMAIN (51)...(147): Methyltransferase domain
  misc_feature (1)..(164): Xaa is any amino acid
MDRIESIKNHFEVEAEVFDKTILKLIPHYYEMIDALVQSIPFNQDEHINVIDLGCGTGTVARKIKDLFPNAKISCLDIAENMINLAKKKLGGCVDCYMCDFYNFDFDKKYDVIVSSLALHHLENDEDKKRFYQKIYNALNDNGVFYNADVVLGSSDRLPDLYIA

SEQ ID NO: 106084 - protein, 267 aa, Unknown
  Obtained from environmental sample
  DOMAIN (107)...(176): HAMP domain
  misc_feature (1)..(267): Xaa is any amino acid
MDTDIKVFEDNAALFGKSTMRPDVKALYITAMRIYDDVSKPGLQKIIDMAEEGAPQAEMVAYMNTIAKPAADLITKNMVKATDINADLLSAAITECNNNSAHVIAIMIAFLLAGIGIAMFFGTYITRLICKPLGDTVRMIKEMGLGHLDTRLRLNRKDEIGELAKTMDQFADDMQNIVIATMKQISVGDLSAEIKQKDSKDEVAAALKGTIDELHALIIDDGGKVLTAAANKDLSHRLTGNYQGVYATMKEHINTVVETLDSALCQV

SEQ ID NO: 106085 - protein, 267 aa, Unknown
  Obtained from environmental sample
  DOMAIN (1)...(252): Bacterial extracellular solute-binding proteins, family 5 Middle
  misc_feature (1)..(267): Xaa is any amino acid
DREKNPVGTGPFIIENYAPQQSLTLVKNPNYWQKDLPKLDKVTIIFASDTNNLLLGLRGGNIEAAEITGAFLPQLDQKQFETVPSYSNMVQLLALNNLQKPLDDERLRKALNYALDINGIIEAAFYGHGEPSGSPLIPGLKNVYDESLRDPYPRDIEKAKALMREAGFPNGFSLEITVPSVYTMHVDTAQVIVSQLSEAGIGATIRLVDWGTWLSEAYFGRNYQATIISLDANTISPRSFLFRYVSGDSGNFINYTNPDYDRTYKAT

SEQ ID NO: 106086 - protein, 209 aa, Unknown
  Obtained from environmental sample
  misc_feature (1)..(209): Xaa is any amino acid
SVRSWEGCAAVKTFIAPGTPLIPHLRARDFSLDEPFPLAGFFRENGISHALVIAGDPEPGKPDKTENNHTIKFIKKIKTELPELEIYAGFDPYRTNIRYELDYLAAKEEAGAAGFMSQPFFDLRLLELYAEYLEGKSVFWGISPVLSESTKHYWESRNRALFPRSFLPDLYWNINFAREAMDYCKHNNFNLYLMPMKTDIKTYLSGIWP

SEQ ID NO: 106087 - protein, 257 aa, Unknown
  Obtained from environmental sample
  DOMAIN (50)...(127): Bacterial Ig-like domain (group 2)
  misc_feature (1)..(257): Xaa is any amino acid
MKNVNNKCAKILRILATQIRRICAIALVAVIALSFALAACDDGNGTRDVPVTGVTLDKNTLSLTVEGSETLTATVAPDNATNKTVSWSTSNAAVAAVDEGVVTAVAAGTATITVTTQDGGKTASCSVTVTVPIAPDLTGTITIGPSTDVNINTELTATYDGSETVSYQWKKGDTNVGTDSNKYTPTQAGSYTVTVSAAGYKSKTSAVVDVNDPSLSTLSGNITISPNSGVTVNTQLTAIYSGDEIVSYQWEKDGSSV

SEQ ID NO: 106088 - protein, 291 aa, Unknown
  Obtained from environmental sample
  misc_feature (1)..(291): Xaa is any amino acid
DTAAIDMEDDSGDGLMVEDVTFTNGVGEGPASGTSGGDSSMKWTAVTQNVFTSSNDINAIAFGGGTFIAVGNGGKMAASTDNGETWTAVTQSVFSGSSPIDINAIAYGNGKFVAVGNGGKMAVSADGGVTWSEVTQNIFTSTIYTIAYLNGKFYAGASSTMAYSSDGTTWTSVYNNQIGNPITAIAYGSLGIYSKYVASGWNNNMAASSDGTTWTKVTQETFISTDTIYAIVYYNYTFFAGSGSGKLAYSSVANNIWTEVPQSVFGNSIGFKAIAFGNGTLVAVGDRGRIS

SEQ ID NO: 106089 - protein, 169 aa, Unknown
  Obtained from environmental sample
  misc_feature (1)..(169): Xaa is any amino acid
MRMILITAVFAAVSVGSAAAQQTGTFTDGRDGQKYKTVKIGEQTWMAQNLNYQTESGSWCYNDSASYCKQYGRLYGWKTATTVCPNGWKLPDTADWNRLVATAGGWETAGNKLKSKSGWNRDDYKNVSYNGTDDYGFSALPGGGRYHRAGFNYAGEIGYWWTATEGDAR

SEQ ID NO: 106090 - protein, 200 aa, Unknown
  Obtained from environmental sample
  misc_feature (1)..(200): Xaa is any amino acid
TFAMPSNAATVTAVFEAAVIAGTLADSRDGKTYKTVKIGKHTWMAQNLNYQTESGSWCYKDSISYCKQYGRLYDWKTAATVCPKGWKLPSYKDWNWLVATAGGEEIAGQKLKSESGWNKNGNGTNDFGFSALPGGFRNSSGNSLNVGSSGYWWAATEDNTGRAYGRNMHYDGDGVYGSAYDDDNFKSHGKSVRCVEEDQP

SEQ ID NO: 106091 - protein, 238 aa, Unknown
  Obtained from environmental sample
  misc_feature (1)..(238): Xaa is any amino acid
MHVLYYITSHGYGHAVRSAVVCNALREAVVGICTGIGIDTDIDTDTYGFRLTIRSDVPQTFFKEELPFPHNRRSGGFDVGCLQSDGVSVLVKETLATYKDISVNNRLLVNDEARWCRDNAVDCIVGDITPFAFDVADRAGIPSVAIGNFTWHDIYSPYVERFPEYETMLSEMADQYRKASIALTLYPSTPMPVFERKKSMPILGRRGVDRRDEICRYFGIDRNKRLGVIYVGNFGLDG

SEQ ID NO: 106092 - protein, 271 aa, Unknown
  Obtained from environmental sample
  DOMAIN (14)...(267): Polyprenyl synthetase
  misc_feature (1)..(271): Xaa is any amino acid
ERVLPPRIAYPASIHTLMRYSSFAGGKRVRPCLVAAAYEACGGTEGNERVFKAAAAIEMLHTFSLIHDDLPCMDDDDFRRGKPTAHKAFGEALAVLGGDALCISAFETLASVGRIDIISEIAVALGTSGMLGGQVVDIESEGKTVGRETVEYIHTNKTAALIKASIRVGALLADAPPDTLEKLSSYGSNVGLAFQVVDDILDEEGTTESLGKDAGSDVEKGKATYPAVVGMDESKKYAHELIEKAWADIAFLGDKGIILKDLAEYIRVRIS

SEQ ID NO: 106093 - protein, 117 aa, Unknown
  Obtained from environmental sample
  DOMAIN (1)...(101): Protein of unknown function (DUF1016)
  misc_feature (1)..(117): Xaa is any amino acid
DHYYVDLVFYNYMLKCFVVIDLKTGKLSYQDIGQIDFYVRYFDDQIKLPEDNPTLGIILCADKNETMAKYSVLSDKENLLASKYMLYLPTEEELKKELERERLRIESKLEEDSDSVK

SEQ ID NO: 106094 - protein, 235 aa, Unknown
  Obtained from environmental sample
  misc_feature (1)..(235): Xaa is any amino acid
LTIDAYPAYDKDRIPFLVDIKAFFRIVDANVAAARVQDFKMLQNHLLGIVQGTVRSILAKSKLENIMEERSIYAEEFTAAVKDNLKEWGIEAVKNIELMDVRDADKSSVIQNIMAKQKSMIEKESRVAVAENMKKAEQAEIQATREIEVSKADAERQSGEAKATSIKMIGIADAEAHREVGVSKEKAEQKIKEEAKITTEKEMQVQEVAIVQKAEITKKAAIVEAEQKQKQMRLP

SEQ ID NO: 106095 - protein, 162 aa, Unknown
  Obtained from environmental sample
  DOMAIN (1)...(120): Zinc-binding dehydrogenase
  misc_feature (1)..(162): Xaa is any amino acid
GKIAGCEKVIAIGGNPASLKLAKELGATHTINRKETDDIVGEVVKITGGGAHYAIDTSGVPDFVRKALNCVRMLGTAVVLGATGDLTFNVQMELMGPAKSLIGVIEGNSVPRLFIPQMLRYYKEGRFPVDRLIQYYDFADINQALADSSAGKVIKAVVKMPH

SEQ ID NO: 106096 - protein, 103 aa, Unknown
  Obtained from environmental sample
  misc_feature (1)..(103): Xaa is any amino acid
KTEYPVLTAVMGRQNKIIVSGKIDLLFDAGNVFYVVDFKTDRDEDTARHAGQLAIYKQAVEDIFGKPVECRLFYLRNGREADMTGEVSKISLEELLAARLNDQ

SEQ ID NO: 106097 - protein, 285 aa, Unknown
  Obtained from environmental sample
  DOMAIN (1)...(285): UvrD/REP helicase
  misc_feature (1)..(285): Xaa is any amino acid
ETLLAGMENTGSLIENIVAYVNFLYDVRNFRFYGRKGETEAVLIIKEAFAELKDLHVQLEALANHALQWEMVKAVFPLIAEYQELLNRKKRETGILSFNDIARLAVDGLKAHEDIRRMYRETFRMIMIDEFQDNNSLQRDLVDLLAGPADVFYVGDEKQSIYRFRGADVSVFRSLAEEAKLKLSLNKNYRSHPSLILAFNRIFGGYRTEDDPAPQGGVFPPDGTKTKKHQATYRWMKSSDADTARKDAPHLHFAFFDESRLDPKSSLSSWDHEAAYIAAAIRDMK

SEQ ID NO: 106098 - protein, 273 aa, Unknown
  Obtained from environmental sample
  misc_feature (1)..(273): Xaa is any amino acid
NFGFAILPFDMFPRQIAEIALLKIRNYIGRYGNKEYVYHQLAAQLQGKEAYLKDQLEQILIKPMDQYRVIAENRETTSLFWTHLCGLIKSDIKKKNEKLTTDIAVYQAVYIIEVINSFFRSTAAKRREAEAAFRNLESQLAKPPYLYTMDQIAKFTGPGGGLLLGQYTSDELSEWMKRQITESKNDELPALLIVKVKTRDEQQYFLLKDKVMPLCARLLHDGQILIRRAIAKQWGKVISDYETDLAMTNDGEFEKLLAKTAEKLCPELMSLLH

SEQ ID NO: 106099 - protein, 158 aa, Unknown
  Obtained from environmental sample
  misc_feature (1)..(158): Xaa is any amino acid
MKLNFELKLGAVIGIVITIMSVTSFFWIPHDYNRMDYEKRFSPPSVKNLLGTDNFGRDIFSRIMAGGRNSLILAVCTVAGAAAIGSILGMIAGYIQGITGEIIMRLIDTLSSFPGIVMALLFVAIMDNGQFTIFIALLILFIPSYTRIMRTGAIQYKD

SEQ ID NO: 106100 - protein, 262 aa, Unknown
  Obtained from environmental sample
  DOMAIN (219)...(260): Oligopeptide/dipeptide transporter, C-terminal region
  misc_feature (1)..(262): Xaa is any amino acid
MLGGKVKNPIKAVDGVSFEIRRGEIFGLIGESGSGKTTIGKLVMKLLDPTSGTIHFNGDDVTKTDAERTQSYRRQVQMIFQDPYASMNPRFKVRDVLEEPLIIHKIHGSIAERERMIIKALNEVKLNPPEDFIGRYPHMLSGGQRQRVATARTLILNPMLLVADEPVSMIDLSTRAEILHMMKDVQRDLGLSYLYITHDLSTARYFTDRIAVMYLGRIMELGNADDLIDRPMHPYTRALIEAVPEPETGKVGIIKNLPIHGE

SEQ ID NO: 106101 - protein, 245 aa, Unknown
  Obtained from environmental sample
  DOMAIN (3)...(230): NAD dependent epimerase/dehydratase family
  misc_feature (1)..(245): Xaa is any amino acid
MKVLFIGGTGTISSAITRRAAQLGWELYLLNRGNRKGEFKDLEIKHITCDIRTEETSVIREKLEKAVGKGNKFDVAADFFAFVPEHVQKDFDILNELCKQYIFISSASAYQKPLSSYLITESTPLANPLWRYSRDKIACEEFLTQKYREYGFPITIIRPSHTYDERSVPLGVHGAKGSWQVLKRMLGGKPVIIHGDGTSLWTLTHNSDFARAFVRIMGNIHAIGEAVHITSDESVTWNQIYQISL

SEQ ID NO: 106102 - protein, 273 aa, Unknown
  Obtained from environmental sample
  misc_feature (1)..(273): Xaa is any amino acid
MPTREAMLAQADSLALFIRSTEESIRFIQSEMDLSIQVDVDRANVLIRGIYDLGVQIKQHTMKGISNPNDLMDKRDQLVRDLSELIDVEIYQRDDFYQVRLKTGTLLVDDVKGHFELEVMGPKSETHLAQMQGSPAQLSNYSGNVTFLGNDTYEYTLEITRGGNADGPLASPPTDSPQFRVSLDGGRTWLKDDDGKDLLFDIPPNYIDPNTGIVTTATQYIQVKNLRVSFEDLTGGNANFNAGDKFTIVPKTGLYFVAPTKGSVEGIPFYGSP

SEQ ID NO: 106103 - protein, 243 aa, Unknown
  Obtained from environmental sample
  DOMAIN (67)...(243): chorismate binding enzyme
  misc_feature (1)..(243): Xaa is any amino acid
MLFDKVIAFDHYRQKIVLIVNVNAENIKAEYKSGVEKLEDLKSIIKNGVPQQPAKANVKSELKTLFTKDEFCEMVNKAKRHIKEGDIFQVVLSNRFEADFEGSLFDTYRVMRTINPSPYMFYFSGSDLEIAGASPETLVKLHDGKLFTYPLAGTRPRGADDSEDLTLEKELLADEKELAEHNMLVDLGRNDLGKISKFGTVKVEKYMSILRFSHVMHIGSTVSGEINGGKTGPDAINAILPAG

SEQ ID NO: 106104 - protein, 279 aa, Unknown
  Obtained from environmental sample
  DOMAIN (1)...(279): Protein of unknown function (DUF1703)
  misc_feature (1)..(279): Xaa is any amino acid
TKVDSFDRSYDTLMDCIAKEFERHTYVAEKILSDYDRDLFKKLSNRAGTIGDYSRSLKFLSECLENYHGKKAIILIDEYDVTLENAWSRTPRFYDKMIDFIRPLLSSAFKDNPHLQMGVITGCLRVSKESIFTGLNHLDVVSILNKDYSEYFGFTQSEMDAMLAYYGLDGKTNIVRDWYNGYMFGNTEVYNPWSSLYVVRSWINDINETPKPYWANTSGNNIIRDMIDKVNIDAKTGLETLMAGGTISAVVHEDVTYDEIYEDTDNLWDFFAFYRLFEK

SEQ ID NO: 106105 - protein, 277 aa, Unknown
  Obtained from environmental sample
  misc_feature (1)..(277): Xaa is any amino acid
NPEDLTVSLNFSLDPDRDSVERRFSLTGNNGKVKGKFLWEGRRVTFVPAAPLEKNNDYNLLLSAEAHDTNGLSMDFAFERKFTTRPGTQRPELISFSPSMYAKIDDLKTEVRLYFSLPVPLSALYDNVSFNPSISGAWRQEEEGRLAIFTPSVPWAKNKRYEMRYSTSFTDNKGMNIGNDFKSIFITGTDKEIPELLQANRMTKDGGLIPLERDVTGFTSAAENYTENKGWEKEDRLFLVFSKPVDSASVKNCVNTEDASSVYMETAAGFNNEFVFY

SEQ ID NO: 106106 - protein, 248 aa, Unknown
  Obtained from environmental sample
  DOMAIN (2)...(124): tRNA synthetase class II core domain (G, H, P, S and T)
  misc_feature (1)..(248): Xaa is any amino acid
MQIDNQDYIIKPMNCPFHIMIYKNKGRSYRDLPLRWAELGTVYRYERSGVLHGLLRVRGFTQDDAHIFCTPEQMEDEIREVLRFSLWIWKQFGFKEIKAYLATKPAESVGEQSRWDAALESLRRAIDAEGLGYEIDEGGGAFYGPKIDLKIKDALGREWQMTTIQFDFNEPERFDMTFVDADGKQKRPYMIHRALLGSLERFFGVLIEHFGGSFPVWIAPEQIAVIPVSEGFNEYAKKITSELKNVNL

SEQ ID NO: 106107 - protein, 266 aa, Unknown
  Obtained from environmental sample
  misc_feature (1)..(266): Xaa is any amino acid
VVNDASTDASAQILERIVAQHREIKVFTHEKNCGKGAALQTGFIHATGNFVGIHDADEEYNPYDYLEMLKPLLAGKTDVVYGSRYLRPDTRRVLYYYHTKANKILTNISNMFTDLDLTDVHTCYKLFRKDVIDSMVPKLKEKRFGFCPEVTARVAEAGYRVYECAISYNPRSYEEGKKIGWKDGVRAMYCNFHYGAHIAPTLTQFMIYMFIGGVSLLSNMAFFMLGNVLTVPIDYSIIGAYIFAAIINYVLCILILFRHNARWKTP

SEQ ID NO: 106108 - protein, 244 aa, Unknown
  Obtained from environmental sample
  misc_feature (1)..(244): Xaa is any amino acid
REEYSFAAWNTAPDGSGTGYSDIHQVSNLSAQDGSVVILYARWNSIYQNTVNFESNGGSAVSPVAGVNGGETIRRPADPVRTGFTFGDWYIDNNTFARSWDFNTGVVTEDITLYARWEPITYTVRYDRNAVDAVGTMDVSSHIYDDDKALTYNGYARAGYIFTGWNTAPGGGGVPYGDGQTVRNLSAQADAEVILYAQWKYIDVNLITVIFNSGGGSNVTPVTGLNKGETIPRPADPSKTGNTF

SEQ ID NO: 106109 - protein, 267 aa, Unknown
  Obtained from environmental sample
  misc_feature (1)..(267): Xaa is any amino acid
MSDSIHIYDEDKPLTANVYTRTGYTFAGWTTASGGAYSDGQLVRNLSATNGDIVILYAQWKIIAYTVTYYPDGGLSSPSPNPATVNHGTVLNRPAAMTKTGHTFDTWYRDTDKKTPAVFPITVTENITLYATWTPVTYTVRYNGNAADATGSTADSIHTYNLEQTLTRNGYSRAGYVFMGWYIVSNGNVTNYTDEQLVRNLRTTAGIVTLYAQWKPQYNITYYSDGGTPAPSNEIVDYGYVINQPPAMTKDGYIFHKWYRDPAKKIP

SEQ ID NO: 106110 - protein, 278 aa, Unknown
  Obtained from environmental sample
  misc_feature (1)..(278): Xaa is any amino acid
RFFNEVASGLDSGSIQQKVAEIQQKIVNGEGLDLGSIQQKLADIQQKVTGKDGLNLDSIKQKLEEIQQKVADKVEFNSTPAADSSTDNTNTNDGKKTSGITFGAGHDIFFPSKAGMALTTVNIDAKGNTEGYSVLTVKNVDGVRGNMTITYGINALDKNRNPLKGLSDGMTYQVVIKNGVMIMDINQMIPAQVREQGAVKMEVTGTPMELPSIMQPGQSLKPSEITIAIDVGIMKVKTVVKTEGKYLAIEDVKVPAGTFKCHKITHKITTTAVIITTT

SEQ ID NO: 106111 - protein, 63 aa, Unknown
  Obtained from environmental sample
  misc_feature (1)..(63): Xaa is any amino acid
MSIKTFPLSKPQLEELAKQYHTPFYLYDEEAIRKNVRRLIAAFSVFPAYKEHFAVKATPNPIC

SEQ ID NO: 106112 - protein, 97 aa, Unknown
  Obtained from environmental sample
  misc_feature (1)..(97): Xaa is any amino acid
MPNRNPCLANLKAGYLFPEIAKRRREYAAAHPEVKIISLGVGNTTEPVLPYIDAGLVEGARQLGTVKGYSGYQDEGLLSLREKISMVFYGGQFSADE

SEQ ID NO: 106113 - protein, 121 aa, Unknown
  Obtained from environmental sample
  DOMAIN (6)...(121): Peptidase family M50
  misc_feature (1)..(121): Xaa is any amino acid
MLTILAAVIQLSLIVFVHELGHYFFARRAGVRIISFNIGFGPKLWAFQGKTTTYALRWIPLGGYVQFADNQSAADIPPDERYENKSWLARFGIMSGGVLFNILFAWAVFYGIYIAFLHWAF

SEQ ID NO: 106114 - protein, 269 aa, Unknown
  Obtained from environmental sample
  DOMAIN (86)...(269): Na+-transporting methylmalonyl-CoA/oxaloacetate decarboxylase, beta subunit
  misc_feature (1)..(269): Xaa is any amino acid
MLMGAFVFSFVSTAFNARAQAQSVASSEDLPSFRNMNGIIPNSSNIPPVKFLTFLTNIGRTTGIYAFVTHITDSETPAGFPITVYGWQELIMVLVGFLVIYLGAAKGFEPLLLVPIGFGVVFANIPNAGMGSPGVWNEAEHIFEHQGFLSVIYNAGVGNEFFPLLIFVGIGAMTDFGPLIANPKTALLGAAAQFGVFATLFFISVANFLPHVAFNLKEACSVAIIGGADGPTTIYIAAKLAPHLLATVAVAAYSYMALVPLIQPPIMRA

SEQ ID NO: 106115 - protein, 215 aa, Unknown
  Obtained from environmental sample
  misc_feature (1)..(215): Xaa is any amino acid
VAEPEQLDILFNKLSQNFELLYGYFNKINVDLKLPLHLNLGTITDIDEIFGGFDPSAHLTEDLFLNKVAFTILLNFRTYSLEEKNTLGQHWTRKEWAYARMGDMFTSRVPADLLQEFSEIVQGADNYISEYNICMDELQNNDGKTLFPKNLKLISHWGLRDELKSQYAQPKGLEAQKMIYAVMKRIINQDIPQVVINNPTVQWNPFENNVFENGK

SEQ ID NO: 106116 - protein, 240 aa, Unknown
  Obtained from environmental sample
  misc_feature (1)..(240): Xaa is any amino acid
MAKKGGIIDGDFYLADLLSTENVSLKDRLLIVLQSNHYKFAKGQDEYGISLFGEIQFKDNQKAYNEFWRKYKRPPLETYWDYIIERRDLLVPQDIRERKGSFFTPQIWVQKSQEYLAKVFGINWQDEYYVWDCAAGTGNLLVGLINKYNIWASTLDNQDVGVMRDRIKNGATLLENHVFQFDFLNDEFDKLPEGLKQIIDDPEKRKKLIVYINPPYAEVSSKNITGKVGVNLSKIHEKYS

SEQ ID NO: 106117 - protein, 273 aa, Unknown
  Obtained from environmental sample
  misc_feature (1)..(273): Xaa is any amino acid
VFGKVDVIPFGCALSRKTGNGAHSPGTCSGCSSLGKEAIALALDNWTISVKATGYETESRTFSPKAGMNPLQTITLSKDQGDTEGFVPEVLGIGVGATTSEQRFVWFSDDAAANNKSFVRIFKGSDIVSTDSGEAGSASKGKRYHKATTSNLSPNTEYKYSVSNNKTDWSRKYSFKTPGTGAFTFALAGDMHQGYIPDKSTRQRPIEGWDTTMRRIASRNVNFILDVGDHVDTADHDDFYKPFFAPAPMHNIPMAVTMGNHDINDIFIHHFNL

SEQ ID NO: 106118 - protein, 251 aa, Unknown
  Obtained from environmental sample
  misc_feature (1)..(251): Xaa is any amino acid
TFFKTGVLSVTANITDGGTLTYQWYKNSSNSASGGTAITGATNLSYTLSVVGTYYCYVVVTNTIANNGDGGTKTAQTTSNIAAVTVEPVLAEWARTVSAGNNNSVFWAVVADSSGNVYTAGRQQGNGTYTYGNGVSAQGTSTSSNVVLVKYDSSGMVHWARTVSAGSNESQFNAVAVDSSGNVYAAGYQYGNGTCTYGSGVSAQGTSTSKNVVLVKYNSSGTAQWARTVSAGSNSSEFKVVAVDSFGNMYA

SEQ ID NO: 106119 - protein, 58 aa, Unknown
  Obtained from environmental sample
  misc_feature (1)..(58): Xaa is any amino acid
MAILAKKIQENKTKAIAELKESFGNASDYVFTCYRGLTVEQITALRKLLRAKDVNTRL

SEQ ID NO: 106120 - protein, 282 aa, Unknown
  Obtained from environmental sample
  misc_feature (1)..(282): Xaa is any amino acid
AYHVNVPEKGLYYFTLNYNITSGGFIDVIVSLQVNGETQYSEANSIVLPVFWEDESKIYPIDKYGDESVPLQRQIQGPHTVSLFDTRYTTDMPLNFLLNQGENLIEIKNETSQTLWLGDLTAYSAREPAPYKASGTATVPEYIRVGAADYVKKNSPHVSVNSYSSPHITPYDRLNKKIGTIRSTRAGNEVFYQFYAPYDGNYAITFHCQTAVADFSSFVSVKIDGEFPFAQAASYPLPPSINVWRNQTLTDAEGKPFLVYLSAWRPIPFLLKREFSPLSRYE

SEQ ID NO: 106121 - protein, 124 aa, Unknown
  Obtained from environmental sample
  misc_feature (1)..(124): Xaa is any amino acid
NYGTKTTGFASPAQGYEEEGIDLNRLLIHNPPATYFGRLETDRMEALGLPQGSLLVVDRSINPAPYSFVLIRHEGEFMCRQLLKHEGKTVFTDGTTFIFPTIGETEIIGTITAFIKECTNANAH

SEQ ID NO: 106122 - protein, 286 aa, Unknown
  Obtained from environmental sample
  misc_feature (1)..(286): Xaa is any amino acid
LHDNTIKVIAVKDGWKNSDVLTVAYTVPQAATPTANPAAGVFNTVQNVILTTATPGAAIHYTTDGTNPTKTSALYSSAINISGGTTLKAIAVKDGWNDSEILTAAYTFNFPFTTAPALTLAVNDAEITYTWTTSDPEADSYDVYWKAGNGLSAAEVKTSGTKITGAVSGGSITGLINGTMYTVIVTANKADYAAIDSLTKMETPFDYPYIIMGSGAAFTATKNGVTVGTASQPIQDVINAIRTHAEGKGCLIQFGNGTTALDTGSTSLSFDNTSGTWGPVMLDGKL

SEQ ID NO: 106123 - protein, 284 aa, Unknown
  Obtained from environmental sample
  misc_feature (1)..(284): Xaa is any amino acid
PGFTVTFNPNGGAFEELTTYPTKKVIYPATTVDALPTAPTRDEYVFAGWYDTHEAIGGNEFTATTTVTGDITVYARWAPVPVVYFNKNNTDTSGATEANPPSEAAEGGTVTLPTTPPTRSEGWGAGMVFDGWNTQADGKGDDFTASTTVTADITVYAKWKFVAGTPQVVGDTMVHNAPQMSNNSASADGQNNWTGTMNNDGSATYSSGAIRYQFPSGYANYDFFELEYVHTGNLTVILKQYNNSTDYAPIQINGSNSTNQYPSLNNSGSFKFNIVDAKNGGIAL

SEQ ID NO: 106124 - protein, 140 aa, Unknown
  Obtained from environmental sample
  misc_feature (1)..(140): Xaa is any amino acid
VERRENREKVKKIQVESIINALREGGDVASRLEHFEPRQAQLDLMELVIKCFNENAIGAAEAGTGVGKSFAYLLPAMRFAVESGERVVVSTATITLQQQLFGKDIPLVNDAIKAKIKVVLVKGRGNYLCRRRLLDALREP

SEQ ID NO: 106125 - protein, 96 aa, Unknown
  Obtained from environmental sample
  misc_feature (1)..(96): Xaa is any amino acid
MLTREEFIFTIGYDGPAAVVDGQARRRYGGLSTRELAEKGQFRAAYSSAIWSKDPKEIETLVEIYNRISGASLTPDSPLDRLFGVFPINVTRSITL

SEQ ID NO: 106126 - protein, 53 aa, Unknown
  Obtained from environmental sample
  DOMAIN (1)...(49): Rubredoxin
  misc_feature (1)..(53): Xaa is any amino acid
MDKYVCDTCGYVYDPAKGDSSGGVKPGTAFKDLPEDWVCPTCGVGKDSFSPIS

SEQ ID NO: 106127 - protein, 274 aa, Unknown
  Obtained from environmental sample
  misc_feature (1)..(274): Xaa is any amino acid
MRKRNLFFCFILVLAALPVSVFGQLKVWSFTDEMDNIITNYYKKSHPAVRVEYSQMQWDQFQDKIELVLASGLGTPDIIALESAFVRKYVESGFLLDITDIYEANKNKLLAYPVEVGTYNGKVYAMSWQACPGAVFYRRSLAIKYLGTDDPKTVQSYFANFNKFLDTAKLLRDRSKGSCVIVSSLGDLRNSFLSARKSPWIVNNKLVIDPVMEQYMDICKTLRDNSLEGGVGQWSEGWIAGMRDELRDDYWEPKEVFSYFLPTWGLHYVLKTIA

SEQ ID NO: 106128 - protein, 80 aa, Unknown
  Obtained from environmental sample
  misc_feature (1)..(80): Xaa is any amino acid
DLQSEKDGRGNALLSDNVVLDNVSGCLVTTPTNKLVVLQGLENYLVVDTGDVLMVCKHGDENELKQLINNTLLGKGAARA

SEQ ID NO: 106129 - protein, 153 aa, Unknown
  Obtained from environmental sample
  misc_feature (1)..(153): Xaa is any amino acid
YGSELSTSENRIKVARKWGLRDVICSDQQNLEKYPFPKGGVDRVLVTAPPALIPLATRLCNVGGIVSFIGIDYGEGAMFTLDSNVVHFNKLQIRASHASPALYFPLCLDLIKTGAVPVEELITHRFPLENIQNAITDFRSDRKNGIKAIMVRE

SEQ ID NO: 106130 - protein, 120 aa, Unknown
  Obtained from environmental sample
  DOMAIN (3)...(120): Oxidoreductase family, NAD-binding Rossmann fold
  misc_feature (1)..(120): Xaa is any amino acid
MALRYGLIGCGNIARFHFAALRKIDARITWIADINLNTATQYAKEWNARATADYNELIAATDVDVVCVLGAASIHKDALQKAIIARKHIICEKTMTNCEKDAVEILRAAKTSDKMFFTSY

SEQ ID NO: 106131 - protein, 255 aa, Unknown
  Obtained from environmental sample
  misc_feature (1)..(255): Xaa is any amino acid
MSRKGEIVIRDDNNLPREKHELIYGAHLKLKSLKSEVAGLLPAEGILSDDELPRYAEELKKGAAQILKAMKDKDALARLRGELAPVHRRLAAWGAARGFMTPEGQLTEEGEAAPQMAELAAVWPAVSEAVGQAGQVLDEYDLKSEQDTRRLAADYQLAVDRPGEFVEWDPFTVPILTEVSGYVSFEDMEEGKTMIERVDQVTGKSSKVIIESKQADVRPRIKVLDAAGKPHLTSKGIPAVYPLPVNAILMVEERT

SEQ ID NO: 106132 - protein, 214 aa, Unknown
  Obtained from environmental sample
  misc_feature (1)..(214): Xaa is any amino acid
YSLLEIEGITAQAYNTYYFDTPDLLCFNLHHNKRARRFKFRTRKYMSNGKIYNEIKQKQNTGKTVKFRQRRDAMNTEPPILPALDDLSVFDEGFAALLGKNGYGNIGKLVPTLHVFFNRLTFLNNHFAERMTLDLGLGYGFGGTELKLNETAIVELKRERGPEQTVAQGYFRSIHKCPSGFSKYTIGISLTHGEAKKNRFLPKIRHLAFERSAA

SEQ ID NO: 106133 - protein, 243 aa, Unknown
  Obtained from environmental sample
  misc_feature (1)..(243): Xaa is any amino acid
LRTCNPGEQCNSNGGVDSNGPGAWDPVWACPANVSAGGLDLAKENLGLKENYVVIAFKNGSAPEVAFSDTVKGALGTPMGNKITITGEHVYLNISYYYANNSIPYNIILSGTAKDGSLRVDANSRATLYLNGVDITNPTGPAINLQNKKRTDVHLVGSCDRRNKLTDGPNYGAADVQTKGTLFAEGSLVFGGTGSIEIRSKSNHAVVSDEFVEIGKGSGSIIIYESKNDGIHANERVNVHGGS

SEQ ID NO: 106134 - protein, 278 aa, Unknown
  Obtained from environmental sample
  misc_feature (1)..(278): Xaa is any amino acid
VLLKELSQLIDIGVSENPLGQVTVTTGGNVLVAPSYVQNLETITVERELPDGTIIKDMGIRFADTRIDFIPAGGQLRGLIDSRDIYIPEYQAKLDELAAAIIKAVNEVHVQGYNLMGHSGFRLFDDGVIEKIDDRTGAKLYFPKYNTAATIKLAPEILQDVQNLAAASEQQSISRGTPLTVKPSVSHSTASINIGVNDVIAGTFLQFLPAGSLPPDGIIPNTVKVIDENGVELTEGTDYAIDYLAGAIRLINPSHANLKLDISYKVNNIAIGNTPSYS

SEQ ID NO: 106135 - protein, 272 aa, Unknown
  Obtained from environmental sample
  DOMAIN (1)...(272): Receptor family ligand binding region
  misc_feature (1)..(272): Xaa is any amino acid
VLNDRGDEEYVVQQYHALLKKGVIAIIGSSYSGVTLALAKEAEKDGFPIISPTASNPEVTKGRGNVFRAIFIDDYQAEVMAEFARAWLNAETAVVFNSEASNSFKRASEIFARSFRARGGRITAVESYSDADDFADILRKHAAAPPDVIFCPEDYVPAGKLVNTVYETGLKNTNVLGSDAWDGLLTYVYNQDAMKNIFYSAPFSFDDHDADVSEFVKKYFEAFSQMPLSGAATAYTSLYILSEAIKKARNTDRTALVRAIKENENDAIIGHI

SEQ ID NO: 106136 - protein, 244 aa, Unknown
  Obtained from environmental sample
  DOMAIN (1)...(50): His Kinase A (phosphoacceptor) domain
  misc_feature (1)..(244): Xaa is any amino acid
MNAITGMAELALRENLPDAVREHILTIKQASLNLLSIINSILDFSKIESGKLEIVPVDYLFSSLINDVINIIKTRVIDSNVQFTVNVDCDIPNALLGDEVRVRQIFLNILSNAVKYTSRGFVSLSVTGEIDEDIVTLYIEVSDSGKGIKPEDIGKLFGDFVQLNLTKNRGIEGTGLGLAITRSLVRAMGGDITVNSEYGKGSVFTVTLPQKIHGPEKLASVEKAEEKSVLVYEPQEIYSHSVLR

SEQ ID NO: 106137 - protein, 133 aa, Unknown
  Obtained from environmental sample
  misc_feature (1)..(133): Xaa is any amino acid
MRGAIVCYLSSHGYGHAVRSLEVARQFARLRPGRRVWIVSASPQFLFAEAMDEFRNISLRGAAVDFGLVQLGPRNFSLAMTARKLRPLVDHAGSILARERAFLRREDAAALWCDIPFLPFEAAAREGIPAIGM

SEQ ID NO: 106138 - protein, 86 aa, Unknown
  Obtained from environmental sample
  DOMAIN (1)...(74): ABC transporter
  misc_feature (1)..(86): Xaa is any amino acid
GGQQQRVAIARALVKNPALILADEPTANLDSTIGREILELMLALNKSEGTTFIFSTHDQMVMDFARRLVRIRDGQIESDEVKGNAA

SEQ ID NO: 106139 - protein, 197 aa, Unknown
  Obtained from environmental sample
  misc_feature (1)..(197): Xaa is any amino acid
MTLSGIWQLKKLAMRNLARHKIKTILTSTAIMVSVAVFIFLNGWLRGMIIDSRRNIVNYEMGAAKLQTKLYFEKKDEMPSYENFTGWKKYRDALDTEGYTSAPRYVFSGTLFSTSGSAPIVFYGVDPAFEAETMRYVPFVDFGRYVQSSTDGGDFGIALGTYAAEKLKVGIPTRPYRQELEELIVSASRNKADADFI

SEQ ID NO: 106140 - protein, 288 aa, Unknown
  Obtained from environmental sample
  DOMAIN (248)...(288): Bacterial regulatory helix-turn-helix proteins, AraC family
  misc_feature (1)..(288): Xaa is any amino acid
NVSISNRENSVLDAASWEKIPWLNRDIPGYRTIVYCNKPFPIRDLPHCIEELYSTLSHSLVIGKSRIVLSGEDVNPLGTLPPLNFDKNLAYYLKENRSCKIKELLHELLEFCEKTDAPQFLAEEELRSFLEQVRRGRAEGNSTPPEDSVEYLVDDAFYYATSYGDLEKNLLYILEKLLPDREQGINKIDTPEFFDLIEEFVKNKLAEPLSLQQSCIHFGISQTYMSRLFRKYTGLSFNNYLTRSRIEKAKQYLSSGNTLIKEAASLTGFSDQFYFSKVFKSLTGQSPS

SEQ ID NO: 106141 - protein, 236 aa, Unknown
  Obtained from environmental sample
  DOMAIN (29)...(236): Flagellar P-ring protein
  misc_feature (1)..(236): Xaa is any amino acid
MKKIIWVIFAVFAALSLSAAAPERKVEIYLKDLARLQGVRSNQLLGYGVVVGLDATGDKDQTKFTVQSLTNLMARQGLNIDPGSVKVKNVAAVMVTAELPPFSRTGQRIDVTVSSTGDAKSLAGGMLLMTPLMGPDNQVYAVAQGSVLVGGFAATTRGGGSSAAKNHPTAGRIPDGALIEREVLVNFADRTELRYALLEEDFSTAIQVVGAINEEIGEMAAKALDPRTIDVSIPKE

SEQ ID NO: 106142 - protein, 211 aa, Unknown
  Obtained from environmental sample
  DOMAIN (1)...(211): Protein of unknown function (DUF1343)
  misc_feature (1)..(211): Xaa is any amino acid
LAQLPEVTLAAAFGPQHGLRGDKQDNMVESQDFLDSIHGIPVFSLYGKVRRPTPEMMGTFDVMLIDLQDLGCRIYTFITTLRYVLEAAALHKKEIWVLDRPNPIGRQTEGLLLEPGWESFVGSGKMPMRHGLTMGEMARWFVRALNLDIELQVIEMEGWEPDSAPGFGWPAPERVWVNPSPNAPNVFMARAYPGTVMLEGTMLSEGRGTTR

SEQ ID NO: 106143 - protein, 269 aa, Unknown
  Obtained from environmental sample
  DOMAIN (99)...(191): PPIC-type PPIASE domain
  misc_feature (1)..(269): Xaa is any amino acid
VPVDEAWVEEENRARHEKISLDYISLTPAAMAVPDPGDEVLESFLKASGDRFQQGPRRVLQMVTVDHSDFGDSLIPDEATLKTTYESKKSSYFELRASHILVRGSTPTEMEAASAKIAKIRERLVAGADFAKVAAEESDDPTAKANNGDLGWFGDGTMDKGFWDGAKDLKKGEISQPVKSMYGIHLIKLHDTRDRTFEEVKQQLTADIINERFSQQAKAKLEQLRKRAGERGDLSAGAEMLGLKVTMSEPFTSDASFVDGLPGVPNVAK

SEQ ID NO: 106144 - protein, 259 aa, Unknown
  Obtained from environmental sample
  misc_feature (1)..(259): Xaa is any amino acid
MDFEVPSYFPSEWEDVEAQYAAAQKMPTSNQDEVKAAAAALNKAADRYGELFDMTIPLYAQAREDEILAIREELVRSRFSALFPQYVEKADKIALTAKDQYDAKDYYAAKATAAEALDEYEKLLIGAKILTARQEIIDRGFVKYDPDNFDKANTISQTAVNSYDAGDKKGAVESAEEALLRYNLVLTNGWIAYAAERRAAAISEREVAIANKVNIAVRDSFRDADAVFNNAETNYKSEVYSDAAQQFIEAEALYVIAGQ

SEQ ID NO: 106145 - protein, 72 aa, Unknown
  Obtained from environmental sample
  DOMAIN (3)...(43): UBA/TS-N domain
  misc_feature (1)..(72): Xaa is any amino acid
MSISAQQVKDLREKTAAGMMDCKKALEECQGDMEKAVDWLRQKGLAKAAKKAGRSTEQGVIGSYVHATGKIG

SEQ ID NO: 106146 - protein, 286 aa, Unknown
  Obtained from environmental sample
  DOMAIN (1)...(180): Peptidase family M13
  misc_feature (1)..(286): Xaa is any amino acid
ELRDPHANYHKFSLADFKKKFSGFDWDAYFNARGVTPDFIDVGQPEPLIKSLNLLKSKDQGVLRAYLKWRVANGAMKSLGDREYDLSFDFYDKTLSGNEERRPKWKDATMITEGVLGEAVGQMYVKKYFPESAKRRMVALVENLRRAYAERIKNLDWMSIETKEKALKKLSTFRVKIGYPDKWRDLSKLEILGDSLYADLTRAAKFEDDFWLDKLRGKKVDKDMWYMNAQTVNAYYSAPSNEICFPAGILQPPFFDMDADDAFNYGAIGSVIGHEMTHGFDDQGRH

SEQ ID NO: 106147 - protein, 185 aa, Unknown
  Obtained from environmental sample
  misc_feature (1)..(185): Xaa is any amino acid
SQAFLWDAFDPELPVKIMTDIEALRGEGAAINGAVIAAGTFPLAPFGSWDPSSLSQTWQLNLSFPLLAIQSLAPHLEKGSCVHILLDACIHRPFLKRLPYSAAKSGMAGMVSGLARALAPSIRVVGYAIGTLLPDEESNVDFLKGQSLLNCIGKPEDLHRAIEFAASSDYLTGEIITLDGGGHWA

SEQ ID NO: 106148 - protein, 209 aa, Unknown
  Obtained from environmental sample
  misc_feature (1)..(209): Xaa is any amino acid
MHLGDECGKGASVRNAYELILPPKLLRHAKDSRELVYDLGNDESDWISAQSKELRTHLDTMGVQLMVLLLADDQPHSILLLGGKYAELGYHREDRELLRDVAIAAGIVIESAIMHRQVLDKTRLDQELLAAQKIQQSLITSAPPVVPGFQIASRLVPAAETGGDLLWIKQRTAGRWISVVGDVSGKGLAAALYMSQSVALIEHASQDPD

SEQ ID NO: 106149 - protein, 251 aa, Unknown
  Obtained from environmental sample
  DOMAIN (1)...(251): UvrD/REP helicase
  misc_feature (1)..(251): Xaa is any amino acid
MIEDVKHEQMLMLTFSRAAVTEFKKRLIALIGNAANFIQIMTFHSYCFDLLGKVGSIEESNSIINHAVNKINAREADFTKLAKTVLVIDEAQDMSMAEYLLVKALIKENENLRIIAVGDDDQNIYEWRDSRSEYFESLLDEPNAKKYELVANYRSTANIVEFANQFVNKITHRFKTIPIVPIKNENGNIRIYKLSSENIVIPVVNMMQNIKQSGSTCIIFRTNEEVLSIVGLLNKNGITARRIHSNDGFNL

SEQ ID NO: 106150 - protein, 83 aa, Unknown
  Obtained from environmental sample
  misc_feature (1)..(83): Xaa is any amino acid
LPFKPILGIDDPRTNKRIDFVGGIRGLGELEKRVNGGMAAAFSMYPTTLDDLMAIADAGKIMPPKSTWFEPKLLSGLFIHDLT

SEQ ID NO: 106151 - protein, 262 aa, Unknown
  Obtained from environmental sample
  misc_feature (1)..(262): Xaa is any amino acid
MAENLNYADKDSKCHDNKPANCTQYGRLYNYETAKKACPKGWHLPRNAEWEKLSNFADSTRKEAGKRLKAKSGWKDTDGKPANGTDDFGFSALPGGYGYGGVGIQGSWWSFTGTQVSITYSDYGYEMPKSKNSGVINNSFTYSIRCIQGDEEEALKADAEENAAKEKAEAEAKAAKDKADAEALEAIRKANGGTFTDTRDKKTYKTIKINGQVWMAENLNYAAENTKCYQDKPENCTQYGRLYNWETAIKSCPAGWHLPKNA

SEQ ID NO: 106152 - protein, 209 aa, Unknown
  Obtained from environmental sample
  misc_feature (1)..(209): Xaa is any amino acid
MHKAILMAAGRGTRISRTIGGSCKCTLDVDGIPLIRHTASMLLKHGIETHVVVGYQKELVFKALDGLPVTFHENIFYSVTNSMASLWWAKEELCGESVILGNADVFWEDNILSVLLNETRDCVMLCDSTRVEQGDYLFNVQDGKVIAFGKGIDCHKANCEYVGLAKIQGSFIAECKQHLKVMAANQRHGDWWEQILYDMVKTRPIWAVD

SEQ ID NO: 106153 - protein, 246 aa, Unknown
  Obtained from environmental sample
  misc_feature (1)..(246): Xaa is any amino acid
CAQYAKSDNRIVLCYEDGTGISAARNRGLVEAKGEFVTFIDADDYILPGMFGTMYERALGQNLDILCCGAKKGLGGQDAGHMDDYTKFDDELFVVAPHSQRDYMYKLALNGRAILLWSKLYRRGFLEEKQLRFHPEAYAEDTVFNFNCYSSATRVATISGQYYIWYDRQGSRTYSSAISDVERSAEIIWALYLGYDGQATQDVWAFAATKIVSSTLFFNLKLKPLPIEQICEVTWGMIQKLGLPPH

SEQ ID NO: 106154 - protein, 262 aa, Unknown
  Obtained from environmental sample
  misc_feature (1)..(262): Xaa is any amino acid
DSPGRLADLVASNLDLKSEQMQDILEISDTFGRLKKIHELLLREIELLEIQQKITMEARGEMDKSQREYYLRQQLKAIQVELGEGNELSEEIEGFRARLAKLKVPEDVMEEIERNIKKLERMHPDSSDTAVTRTYLEWMTEMPWGLMSEDNLDLGRAKQVLEEDHHGLDKIKERLMEYLAVRKLNPDQRGTILCFVGPPGTGKTSLGRSVARALDRKFARISLGGVHDESEVRGHRRTYVGAMPGRIVQASYSVKTMNPVMM

SEQ ID NO: 106155 - protein, 77 aa, Unknown
  Obtained from environmental sample
  DOMAIN (1)...(63): Global regulator protein family
  misc_feature (1)..(77): Xaa is any amino acid
MLVITRKTNESIIINDCIEIVVTGINRDGVRIGINAPREMGIYRREVYESIAEANRSGAGATSALLKAKLTKLKPPE

SEQ ID NO: 106156 - protein, 150 aa, Unknown
  Obtained from environmental sample
  DOMAIN (1)...(117): Lon protease (S16) C-terminal proteolytic domain
  misc_feature (1)..(150): Xaa is any amino acid
GDVQKKDIHVHFPEGAIPKDGPSAGLAVATALLSVLKGIPVKNTMAMTGEIDLRGDALPIGGLKEKALAALRAGVFEIIIPAANMKDLEEIGPEARGQLVFRPVGHVEEVFKLALMGWAPTKPAKSVKPAVPVMPATKAPKNQKTRQVTC

SEQ ID NO: 106157 - protein, 151 aa, Unknown
  Obtained from environmental sample
  misc_feature (1)..(151): Xaa is any amino acid
MLNLTLADVADGENILELYAEDVYGIAGRMVSIEFGVSTAPPVTEVTEPSKDIWNKGAMTVRGTAFDSNGINEVRISLDNGISYQRADIIADNQDRPSVWAISLNTEAYMDGQYSMLVRTSDGYNVQSFTNAIINIDNTPPVVDLVSPKNG

SEQ ID NO: 106158 - protein, 277 aa, Unknown
  Obtained from environmental sample
  DOMAIN (112)...(195): Bacterial pre-peptidase C-terminal domain
  misc_feature (1)..(277): Xaa is any amino acid
TPQGILSNDINSSSITIYTVPMPSNGQTVEYALNTDGSATPLSGWQNSATFNGLIPGATYYIFARAKENDNYFAGAASRSFTTIQLPTGSQTNPFILEDNKWADGSITSSSVEQWFKFTATAATQYIYVNFGTLTDLYVQLYNSSGATAVGDRTELQGSNGSNKYISRTITAGQEYCIKVTGYNSSYSGTYKIAFNSTLIPPGTTITSLTANAWANNGSITSSSVEQWFRFTATAATQYIYVNFGTLTDLYVQLYDSSGVTAVGDRTELEGGNGSNK

SEQ ID NO: 106159 - protein, 234 aa, Unknown
  Obtained from environmental sample
  DOMAIN (24)...(233): DNA gyrase/topoisomerase IV, subunit A
  misc_feature (1)..(234): Xaa is any amino acid
MSDHLENLYDNWYLDYASYVILDRAVPYYEDGLKPVQRRILHTLYEMNRSDERMHKVANIVGRAMQYHPHGDVSIGDALVNMGQKKLLIETQGNWGNLITGDSSAAPRYIEGRLSQFAIEVLFNPETTEWIPNYDGRSKEPVCLPVKFPLVLAQGVDGIAVALSTSILPHNFCELCEASISALRGKRFELYPDFPTGGIIDVSDYNDGLRGGRIKVRARIEKPGFQNSCDKGNT

SEQ ID NO: 106160 - protein, 255 aa, Unknown
  Obtained from environmental sample
  DOMAIN (182)...(251): Response regulator receiver domain
  misc_feature (1)..(255): Xaa is any amino acid
VEGTGLGLAITSNLCGMMGGEICVDSEYGRGSTFTVRLPQGVADEAPLTRLDSPAECATLVFELRPKHLESIESTLRGLGAPFDAVSTLSAFKDGLSGGGYRFAILPKHLYDEAPGVLAAAAAGGAEVFVLLEFSETVPAKGVGTLSMPVSCISVANAFNHAGSAGEPELAGGPGHFTAPGARVLVVDDIPTNLRVMEGLLAPYGLRVDTCASGEEAIELARAGVYDMVFMDQMMPGMDGIEAAGHIKAPRRPGG

SEQ ID NO: 106161 - protein, 271 aa, Unknown
  Obtained from environmental sample
  DOMAIN (24)...(88): Heavy-metal-associated domain
  misc_feature (1)..(271): Xaa is any amino acid
NSDTISGQYRIAANKNGGSMETQTLRIAGMFCAHCRDRIEKTLSGMAGMEKATADFKAGTATVAYNPAVLALAEIAAAIENLGYRVVDEKDRGRAARILINLLLILFLYILLQRLLASEAATAFPLAESGMGYGMVFVIGLITSVHCLAMCGGINLSQCLRAENCRGANGTGLRPPSSLTALRPAALYNAGRILSYTAVGAGVGALGSVFTVSGQLQGAILLAAGVFMIGMGLSMSGIFPALRRFSVRLPIFAPRPDGQKTGRHPLIVGFL

SEQ ID NO: 106162 - protein, 137 aa, Unknown
  Obtained from environmental sample
  DOMAIN (76)...(134): Heavy-metal-associated domain
  misc_feature (1)..(137): Xaa is any amino acid
MHSETLLIGGMSCAVCAGRIEKTVRAIEGVTSATVNLAAEKLFVEYAAPQTLGRISEAIAEMGYRVLEKPTGVAVSISIGGMSCAVCAGRIEKTLAGLEGIAKVSVNLATEKASLVYNPEILRLSAIKEAIAELGYT

SEQ ID NO: 106163 - protein, 67 aa, Unknown
  Obtained from environmental sample
  misc_feature (1)..(67): Xaa is any amino acid
MGEINALHPFREGNGRTAREFFRQLSLNAKYTLDFSKTEKEELLTADIEAFNGKYDKLINILEKVIV

SEQ ID NO: 106164 - protein, 187 aa, Unknown
  Obtained from environmental sample
  DOMAIN (11)...(126): Cytidylyltransferase
  misc_feature (1)..(187): Xaa is any amino acid
MKTVFMSFSTDIIHGGHIAIIKKAADLGQLTVGVISDEVVASYKRYPLLPLADRMEIFRNIIGVNSVIEQISISGAEIIRRLRPDYVVHGDDWKTDFRSTTRQEVIKELSIYGGELIEYQYSSEEKYIALEKQAQAQLSIPDMRRGRLKKLLAIKPLVTVIEAHSGLTGLIAENTKVNHNGKVSQLT

SEQ ID NO: 106165 - protein, 242 aa, Unknown
  Obtained from environmental sample
  misc_feature (1)..(242): Xaa is any amino acid
FTVIDVFSAKDKPPVIAGLAIDIGTTTVSALLVDLSSGDILACGSAGNGQIRYGADIINRIIESTKPGGLERLNHAITGECLCPLIAALCKKAAVTEGQIYRAAIAANTTMTHLFLGVSPEYVRLEPYTPAFFECGPLRSGLPLHPEADTLIAPSTGSYVGGDITAGVYSSMAFNTQGISLLIDLGTNGELVLGNEDFLMSCACSAGPAFEGGDISCGMRATDGAIEACAIDEDTMEPRIKV

SEQ ID NO: 106166 - protein, 132 aa, Unknown
  Obtained from environmental sample
  DOMAIN (1)...(129): Carbon starvation protein CstA
  misc_feature (1)..(132): Xaa is any amino acid
MNGLLLLLISGITLLLAYLLYGRFLARKWGIDPSRKTPACEMEDGQEYVPTSKAVVFGHEFASIAGAGPINGPIIAAMFGWVPVLLWLLIGSVFFGAMHDFAALYTSVRNKGKSAGYVIECYVGQSGKRLFL

SEQ ID NO: 106167 - protein, 284 aa, Unknown
  Obtained from environmental sample
  DOMAIN (167)...(245): Bacterial Ig-like domain (group 2)
  misc_feature (1)..(284): Xaa is any amino acid
VTLNKNSISFVVGGTETLTPTITPSNATNKNVSWSSSKDTVATVSNNGTITAVAPGEVTITVTTDDGNKTAECKVIVVTDVVPVTSVTLNKNSISFVVGGTETLTPTITPANATNQNVKWSSSKDTVATVSNNGTVTAVAPGEATITATTVDGNKTATCIVNVNPVSPTGVLLDKTSISLVVGETEALTPTITPFNATNKTVNWSSNNTAVATVSDQGVVKGVAAGSAFITVTTVDGNKTAVCQVNAVTDVVPVTSVILINKPIFHIIVGDTVPLTAIITPFNA

SEQ ID NO: 106168 - protein, 237 aa, Unknown
  Obtained from environmental sample
  DOMAIN (14)...(176): Alpha-2-macroglobulin family N-terminal region
  misc_feature (1)..(237): Xaa is any amino acid
VSGPGEVGWLPTREEEPLTLVPDKKTYQPGEVARIMIQSPFDQGEGLLTVERAGLRRSKTFRLTSHTPVLEVPIEAWDTPNVFVSVLLARGRVADRPDRRNMDFGRPALRAGYTELAVPSRAGLLDVKVEVDPPEVGPGEEVTVNLTVTDHQGQPCPQAEVALIAADAAVIQLAGDSTYHPENKYNRPYPLLVQTASNILSLVSQENFGQKGGDPGGGGGLSSAQAEELRRLFAALA

SEQ ID NO: 106169 - protein, 261 aa, Unknown
  Obtained from environmental sample
  misc_feature (1)..(261): Xaa is any amino acid
NRIEIFFMTGTAPDPAAANAQDRPPNRPDPALLAYTPPVYPAAGHYTAEEAALEAGRCLQCDCDVCARRCALVSRFKLFPERIGSLVEGTVSPVDVVNNRLATRMVASCDQCGLCAEDCPQGLDLRAIFASARREMVKNGDMPEHFSAFWLEDMDHAEKTAFVVRPDETAKKGAKAAKAAKGAPAATEPAATEPATAEPAATESAATEPAATEPATAEPATAEPAATEPAATEPATAEPAAAEPATAELAAAEPATAGYLF

SEQ ID NO: 106170 - protein, 286 aa, Unknown
  Obtained from environmental sample
  misc_feature (1)..(286): Xaa is any amino acid
VQAKAASELAKSRLLEGEFQAEAQLLSIKKSESELALIKKKWDEDNRKHQNQEALFDAGGVNQEAILSGRFGLESEWDQILLMEKDLEIRKIGCREQDLIAAGIPVPADENGKKRALVSLMTATLRAELTAALARLEAAQKELQSARIVYESLRIKSQSSGVIGVRYFEEGEWVKAGEKIITLMDTSSLYAIFPVREKDALRIEKGMAAKIYIDGINGERQGKVDLVYPQADSQSLSFLVRVLLEGGLQNGIEGLKPGMFSRVRIQVGSPHNGVFLPATALAGKKN

SEQ ID NO: 106171 - protein, 217 aa, Unknown
  Obtained from environmental sample
  misc_feature (1)..(217): Xaa is any amino acid
VLSENAKSAERLAGDCLAILGDDNNIALFPSRDAVPYNMKSPFGPTVEARLGLLSDLLAGRRRLIIAPAAALLQRTPSRRELFNAVIRLETGAETSMNALADWLAAGGFRRESRTDDLGAFSIRGGILDLYPFLSDNPYRIEFWGDTIESIRSFDVFTQKSVGQHKSLEIVPMREFCISDGHIDSAVDKMSASLKNGSLSADEAAVRKLEHQWKTVG

SEQ ID NO: 106172 - protein, 84 aa, Unknown
  Obtained from environmental sample
  misc_feature (1)..(84): Xaa is any amino acid
MDIGAIPSHAFPSMGFVISKATDGRMSLPVSPGQLIYSHFKHVSGTPAPEGTQGVHISRLKILDTMIEQLSKMKNQPHADFGNL

SEQ ID NO: 106173 - protein, 67 aa, Unknown
  Obtained from environmental sample
  misc_feature (1)..(67): Xaa is any amino acid
VALSMGIEGKASGSLGCWIVLAEWKEDKKGNWKIKTVKSAKVDGKRIKPDTYYTLTDGKFVEGDEVK

SEQ ID NO: 106174 - protein, 170 aa, Unknown
  Obtained from environmental sample
  misc_feature (1)..(170): Xaa is any amino acid
ERDRKLWGGKRDRKLWGGKRDRKLWGGKRDRIPRGGKRDRKLWGGKRDRRQRGGKRDRKLWGGKRDRIPRGGKRDRIPRGGKRDRKLWGGKRDRRQRGGKRDRIPRGGKRDRKLWGGKRDRRQRGGKRKRQKLRGTFNGDRRQSIRLIGLLDCISRMERRQKRQLENQDR

SEQ ID NO: 106175 - protein, 251 aa, Unknown
  Obtained from environmental sample
  DOMAIN (80)...(250): E1-E2 ATPase
  misc_feature (1)..(251): Xaa is any amino acid
MNFPLIYGLVQLVLVVPIIIAGNRFYTVGFKNLLRRSPNMDSLIAVGTTSAVVYSVYNLFQIAGGNFHAVEALYFETAGVIIALILLGKSLEAVSKGRTSEAIKKLMGLAPKTAIIIENGEEKEIPIDEVMPGDIIVVKPGAKIPVDGTVTEGHSAVDESMLTGESMPVDKNPGDPVYGATINSNGVIRFRAEKVGGETALAQIIKLVEDAQGSKAPIAHMADIVSGYFVPVVCAIALAAGIGWFIAASAG

SEQ ID NO: 106176 - protein, 158 aa, Unknown
  Obtained from environmental sample
  DOMAIN (2)...(150): Transposase DDE domain
  misc_feature (1)..(158): Xaa is any amino acid
TTAASATAGVFSNAWKGHKLHMAVADGGAPLCAVLTSASLHDSQAAIPLMQMGAGRAAVLYDLADSAYDAAQIRDYSRSLGRVPIIGRCRRRGAGPPPMPPAERARHKERGAVERAFSGLKDSCGGRAVRVRGAAKVMAHPMFGAVALTAACLARLLE

SEQ ID NO: 106177 - protein, 274 aa, Unknown
  Obtained from environmental sample
  DOMAIN (1)...(272): Phosphomannose isomerase type I
  misc_feature (1)..(274): Xaa is any amino acid
LNKAAPAGRPIGESWEISGWGDSQTVVSSGEYMGLTLGELFALSPVDLVGERSAAAKGKGSFPLLFKFIDANEKLSIQVHPNREQARSRGWGHRGKTEAWYVVDAAPNAKIAIGFNRSGVTRAEVAEAANAGRLEPLLNFVPARPGDAFFIPAGTVHAILDSILIYEVQEESNTTLRLYDWNRKCPAGNLRELHIADAVAIINYNEDRALKPEPVAVYKTETFVYETLCDNNKFLLSRCGFLKSGEAPLRTINGFRVISVTSGLIEVHAGDHKV

SEQ ID NO: 106178 - protein, 202 aa, Unknown
  Obtained from environmental sample
  DOMAIN (120)...(202): GGDEF domain
  misc_feature (1)..(202): Xaa is any amino acid
MQPNVYEIISIATERAMEYIKEGFILVDINNNFLLSNPAATEILPGIFLLMKGEPIFSTLGWPDELKNLGKDNVEFSMGGENTRYFRASIGPVYARNKAQVARIILLAEITDSVNLMKELENAAYIDGLTGLYNRKHFFELANADVERAQRLSQTIYTAMLDLDFFKKVNDTYGHSAGDMVLKTTAGVIRQTIRAYDLLCRY

SEQ ID NO: 106179 - protein, 171 aa, Unknown
  Obtained from environmental sample
  misc_feature (1)..(171): Xaa is any amino acid
NRFELEALTGVETQDIDDARRAIDMLHEKGPGIVLVTSYHDGKAGGGPGDERRIGMLASDKSGVYSISTPELPIGAGMAGSGDITASVFLSRYLETGDVKKTLELCTASIYGVIEASWQIRNGKVFSQLRDKFSPDSEKTYIPGPGLMELRIIQAQNELVSPTHSFEAIRL

SEQ ID NO: 106180 - protein, 260 aa, Unknown
  Obtained from environmental sample
  DOMAIN (1)...(260): Sodium:neurotransmitter symporter family
  misc_feature (1)..(260): Xaa is any amino acid
MGFILLSAGCAIGLGNVWRFPFITGQYGGALFVLIYLLFLVLFGIPVMAMEFSVGRGSGKSAARSFHVLESKGAKWHLFSWAAMAGNYLLMMFYTTVSGWMLAYMVKTAKGDFTGLAPNQVGAAFGGFVSDPTQMVGWMIASCALGFCICAGGLVKSVEKITKVMMSLLFVILTILVIRAVTLPGAAAGLVFYLKPNFHAIQEHGLGTVAYAAMGQAFFTLSLGVGSMAIFGSYINREKRLFGESIAVSIVDTLAAFMAG

SEQ ID NO: 106181 - protein, 264 aa, Unknown
  Obtained from environmental sample
  misc_feature (1)..(264): Xaa is any amino acid
PEPTPINLVYTGTEQTAIATNDVYRVEGGKATDVGDEHWAIVSLKDKANYEWADGTTDDLFFAFTISKKQIPKPTAPTNLVYTGTAQTAIAANDAYTVTGGSATNTGTYTATVALKDKYNYEWAGGGTENLSLDWTIAKADPTVETPIGLTATVGQTLASVTLPAGWAWADATTVVVNAGTQKYLATFTPSDTVNYKTLADVEVSVQVSPAEISSSSSDEPIPSSSSANDISSSSETETNPIFSNRENPRIGRIGVQTTANTIL

SEQ ID NO: 106182 - protein, 93 aa, Unknown
  Obtained from environmental sample
  misc_feature (1)..(93): Xaa is any amino acid
MELKSNVPDGPIEKKWDKRKFDMRLVNPANRRKYKVIVVGSGLAGASVAASLAELGYQVECFCYQDSPRRAHSIAAQGGINAAKNYHNDGDSV

SEQ ID NO: 106183 - protein, 277 aa, Unknown
  Obtained from environmental sample
  misc_feature (1)..(277): Xaa is any amino acid
DNVTVTATAASCYTFIGWSGAATGTTNPLTIAVDGNKELIANFQQNQYTLVINTNGGSVTRNPNKETYVCGEQVTLTATPTTSGNSFVGWSGALTSTNPSVTITMDGNKELTANFQADKYTLTTNVSPSGGGSISRSPNQIYYNYGDIVTVTATAASCYMFTGWSSGSTNASVMVTMDGNKELTAYFQQNQYTLTTSVSPSSSYGSVSRSPNQTSYACGTSVTVTATPASAYYVFDGWIGAPSGVSVSSATITFAVNSNVTLTAKFRAQVSKSETLI

SEQ ID NO: 106184 - protein, 258 aa, Unknown
  Obtained from environmental sample
  DOMAIN (1)...(188): AMP-binding enzyme
  misc_feature (1)..(258): Xaa is any amino acid
MTILNTAGVWRKIPGLRQVLAKVCAPVRKVIGQEMKLFISGGAALKPKYFKSYINMGFRIIEGYGLTETSGPACLSNPLRNTLGSVGGPIEGNEVTLRNVNQDGIGEIWMRGVSVMPGYYNNPQANAEAFTADGWFNTGDLGFKDKHGELHITGRFKNMIVLDSGENVYPEELEAYYQYSPLIEEISVFGYRLNGVENVFAAIVPREKNKESYQRIKAEIERLSKNLPSYKKISAFAVSFTPLPRNSTRKIVVRNVIK

SEQ ID NO: 106185 - protein, 82 aa, Unknown
  Obtained from environmental sample
  misc_feature (1)..(82): Xaa is any amino acid
MAADPRGYLKGKRNMVWTFMGNARMYQALNDYGDRLDTVGIFSFNINLDGTINETGVSVSSLAPYRAKWPHIKWLLTCMNNG

SEQ ID NO: 106186 - protein, 260 aa, Unknown
  Obtained from environmental sample
  DOMAIN (1)...(260): Aconitase family (aconitate hydratase)
  misc_feature (1)..(260): Xaa is any amino acid
VFDASKIKAVIDHVTPSKDSKSAAQAKILRDWARRHGIKDFFDVGHNGVCHAIFPEKGFIRPGYTVIMGDSHTCTHGAFGAFAAGVGTTDLEVGILKGVCAFRPPESIKVDITGKLPKGVYAKDVILDVILQLTVNGATDHVIEFRGETVDAMSMEERMTLCNMAIEAGGTSGLCMPDKVTVDYIWPFISSEYNNDKESAAEDFAKWRSDPDAEYAKVLTVDVSTLEPVATIGYKPDQVKPVKELSDVKIDQVYIGSCTN

SEQ ID NO: 106187 - protein, 150 aa, Unknown
  Obtained from environmental sample
  misc_feature (1)..(150): Xaa is any amino acid
MITKRFLLLIGGVLFAMAFIFSCSSDDAKEGLLEFGGQTYKTVVINGQELMAENLNYDVPGSKCYDNNAANCAKYGRLYDWTTAMALYPSCVSRSCIDQIGTPHHQGICPNGWHIPTNAEWDKLYRYIDGSIDTVKSPYDSRTAGRYLKA

SEQ ID NO: 106188 - protein, 255 aa, Unknown
  Obtained from environmental sample
  misc_feature (1)..(255): Xaa is any amino acid
TELIMYGAKYQRTLSFAYLAMSLSQMYLSIAKSTERVRFCAIVSSSSLLLNIILNAVSIFILFPKDPEKAIIGVAMATVIARIFELVCCIVHSLRNRNIRFCMPVRDETQKLLLSDYVLYTGPVLANYVTYGSAVAATVVIIGHVSSDMVAANAIASVVRNLAIVVCGGIGNGGSVLVGKYLGSGDLQSAKRAGNRIYLYALVFGILAGLTILLTRPLIFSIVDINATAKGYLDTMLALCAVYCIGKSVNSTIMA

SEQ ID NO: 106189 - protein, 164 aa, Unknown
  Obtained from environmental sample
  misc_feature (1)..(164): Xaa is any amino acid
NIIVSGGTGSGKTTLVNAIIKKKCEFYPRHRYYIVQDVSELQCEGEYADMPVIRSDQATLAVLLSLRYTPNFIIFGEVRKGAVMAELLDAWNTGHPGGVTTIHANSSGATITRIKKLLLDHYPNESSLPDLNEYIDIIIYIQKDKETGIAINEIMELKTVSSEQ

SEQ ID NO: 106190 - protein, 259 aa, Unknown
  Obtained from environmental sample
  DOMAIN (81)...(169): Peptidase dimerisation domain
  misc_feature (1)..(259): Xaa is any amino acid
MAVFESKELKHGPIEALLTATEETGMDGAKGLKPGVLKGEILLNMDSEDEGELYVGCAGGLDANISLNYSTEPASGEAFNLSFKGLKGGHSGLDIILGRANANKVFVRFLQKAQEYGARLASINGGSLRNAIPREAFATVVVPKDKVADFKAFVEKYTAIIKSEFAAKEPDFQFLVEAGKADQVMKLADQQKLLNLVRGLPNGVMRMSDDMPGLVETSTNMAIVKSENGVTKIACLLRSSVDTAKVSLAEMMTSICDLA

SEQ ID NO: 106191 - protein, 64 aa, Unknown
  Obtained from environmental sample
  misc_feature (1)..(64): Xaa is any amino acid
VEVEWKEAISYTADRLTEIKKKYGPDTIMCTGSARGPGNEANYVMQKFARAAIGTNNVDHCARI

SEQ ID NO: 106192 - protein, 193 aa, Unknown
  Obtained from environmental sample
  DOMAIN (1)...(193): Molybdopterin oxidoreductase
  misc_feature (1)..(193): Xaa is any amino acid
MSNSVTEIEDAALLFIFGYNGADSHPIVARRIVRAKRKGAQIVCCDPRRVEAARISDLHLQLNNGSNLSLVNTLAHVIIEEGLTDDKFIAEHSTGFDELKALVKKYTPEATAAVTGLEPDLVRQAARMYAKSGRSMILYGMGVTQYSQAVDVVKGLANLAIMTGNFGRPAVGIGPVRGQNNVQGACDMGALPN

SEQ ID NO: 106193 - protein, 254 aa, Unknown
  Obtained from environmental sample
  DOMAIN (1)...(254): Histidinol dehydrogenase
  misc_feature (1)..(254): Xaa is any amino acid
AAFCAGVEEVLLVSPPLEDGLPDRKILAAAGVAFKIGIRADFEPKLRVLAVGGAQAIAALALGTETIPRADVIAGPGNKYVAAAKRLLFGEVGIDFIAGPTDVLIIADGTVPNPAELAAADMIAQAEHDPDACARALVSVQTLADQLTAALERQLALLPEPATARASLDRNGLIIVYHNEKEAVRIANAIAPEHLELQIDNSEALIPLLKNYGSLFVGGLSAEALGDYAAGINHTLPTSASARFTGGLSVRHFL

SEQ ID NO: 106194 - protein, 256 aa, Unknown
  Obtained from environmental sample
  DOMAIN (50)...(132): Elongation factor G C-terminus
  misc_feature (1)..(256): Xaa is any amino acid
VLGKGSVRGIKFILHKLEISGNASQNAAQAVVKKACLDAAKMLVEPSAVEIHEPWVDLTVQCPSAHAGAVTKDLLARGAKILNSDGDGKKHRFYANAPLSKLARYTTELLSITRGSGNFSIFQKKGAFMKKLIFISLFMCIASYTYAQDPVALLKQNDLELQKELKKKSHTEKDMERIKYLSSGLFDFAKMAERSLPKKTLDTISKSAKAEFAKEFQRMIENSSVNKFKNSKYTPPDSTIYEEPKFKKDGNEVWVS

SEQ ID NO: 106195 - protein, 277 aa, Unknown
  Obtained from environmental sample
  misc_feature (1)..(277): Xaa is any amino acid
GSITSIGYRAFSGNELKKIIIPGSVITIGNEAFENNHIESVTISEGVTSIGAGAFNNNYIRSLVIPNSVTLIGAGAFNHNHLSGVTISKNIEIIPQWAFADNMLTEIVIPRGVTDIGFQAFAGNRLADITIPNTVTAIGWGAFMHNQLTKVTLPDSVTSIGRSAFRDNKLISVNIPASLTVIEFGAFAENRLANIVIPDSVTSIESQAFANNQLVSITIGADVTLEPKDFVFDVGFDDFYKANGSKAGTYLLTGNLNNQFPPCCSLLFSYSIYYPSM

SEQ ID NO: 106196 - protein, 57 aa, Unknown
  Obtained from environmental sample
  misc_feature (1)..(57): Xaa is any amino acid
VRRDRNEDIKKLEKDKAAGLSEDAAKKALDQIQKLTDDFIKEVDETMKHKEAEIMKV

SEQ ID NO: 106197 - protein, 225 aa, Unknown
  Obtained from environmental sample
  DOMAIN (1)...(193): FtsK/SpoIIIE family
  misc_feature (1)..(225): Xaa is any amino acid
MVLGKDMGGRPVVADLAKMPHLLIGGSTGSGKSVGVNAMICSILLRARADEVKLILVDPKMVELGIYEDIPHLWAPVVTDMKEAGRVLKWVVAQMDDRYRRLTLLTVRNLEQFNAKVIDAGGRIDISDRTPNPRWPDRPASLELLPYIVVVIDELADLMMVCRSEVEESIARIAQKARAVGIHLILATQRPSVDIVTGVIKANLPARLSYRVNTKIDSRTILDSG

SEQ ID NO: 106198 - protein, 222 aa, Unknown
  Obtained from environmental sample
  misc_feature (1)..(222): Xaa is any amino acid
ATSIVHIYKDITFPSGSQQYTLTFDWKGYGGSFYTDSLTVFLVETSVTPVAGTKLSETRLGAYNSQSTWQKTTINIPTTNNGTTKRLVFTWKNVSTDVYTGYDYHQIAVDNIMIGVSGNVPFANVSTGTGGTTATYTPAATVAKSGYAYRCIITDNDGQSTASNYATLTVNKANPAALTWPTAAAITYGAALSTSTLSGGSNTGTFAWTDPATKPTVTNSGY

SEQ ID NO: 106199 - protein, 241 aa, Unknown
  Obtained from environmental sample
  misc_feature (1)..(241): Xaa is any amino acid
MISIAVKNNVAERIEITSNGSVLNNKHADGLCSIAKNTDVSLYLRFSIYSVIPENHLRLTNSRINIENIYQNIKYLKNRRDDSKADNVFIYAKMIDTYSEENNIFLKRYGDITDEAVIETPMNWSGFNDINLLSNVYESTSQAQPTSSHSAVLSPRKVCAYPFYSLCVNADGTVVACCVDWSKKTLLGDIKEQSLYEIWNGPAANELRELHLRGERTKNEACRHCEILHSLPVEDNLDSLS

SEQ ID NO: 106200 - protein, 251 aa, Unknown
  Obtained from environmental sample
  DOMAIN (3)...(184): NAD dependent epimerase/dehydratase family
  misc_feature (1)..(251): Xaa is any amino acid
RLAVIYADISEYANLDISGDYDVFYHLAWEKTSVANRDDADTQVANIRYTLDAVRFAKRLGCKKFIGVGSQAEYGVAMEPLRPETPVNPESGYGVAKYAAGKLCRLLCSQLGLQFNWVRILSVFGPLDGGHTLIMYAINELRAGRSPEFTKCEQIWDYLYCDDAARALLAIGAKGIDGKTYPLGSGKARRLSEYLETLRDVVSPAGVLQFGKREYYPHQPMYLCADISELTEDTGWRPEISFEEGVGRVMR

SEQ ID NO: 106201 - protein, 255 aa, Unknown
  Obtained from environmental sample
  misc_feature (1)..(255): Xaa is any amino acid
APDCEMNNQILRKLFEVTVRSAEILKTADNDTELFRSIYKRLPEPVIHSNGTIREWNEEYEEAEPGHRHFSNLFALWPAGTITPDETPQLAVAARKTLERRLANSGGHTGWSRAWLINFMARLRDGQTALENLNALFTEFTLPNLFNNGPPFQIDGNFGALSGITQMLIQSRIRYSSESFTVLLDILPAVPENWSNGKLNGVRVKGNMEVDFNWQDKRLNSLVIRNNGKETVPIILRTGGEQRVLLLKPGETKII

SEQ ID NO: 106202 - protein, 194 aa, Unknown
  Obtained from environmental sample
  misc_feature (1)..(194): Xaa is any amino acid
MAYLQRILEKFLTATIDTRPLIYLNGMRQCGKSTLVQNISMKQELNYISFDDPASLLFAGNDPSGFIEQLPQNKLNIIDEVQLAPELFRYFKMAVDKKRSGGKDRALYLLTGSANIFALPRLADALVGRMSILTLYPFSASEIKGTGVNFIEKLWYDPLSPRKYTRANVVDIIASSTFPEIAISKKKNRSLWFN

SEQ ID NO: 106203 - protein, 263 aa, Unknown
  Obtained from environmental sample
  DOMAIN (174)...(263): Dinitrogenase iron-molybdenum cofactor
  misc_feature (1)..(263): Xaa is any amino acid
MKKLDVSHVTVTMNAVDPSIGAKIYKYVQYMGKTYTGVEGAAILLANQLAGIKMLSEAGIMCKVNCVTLKGINDHHIYEVTQTAANLGAFMTNIMPHLPVKGSAFEGLERTTNREIMLLREQCGANIKQMTHCRQCRSDAAGTLDRDVSIEFRENTPEIPQPEKFRRFAVATQTGAVVDMHFGQADEFYIYESDEKNARFVETRKVIKYCNGPQCENKEERWNSVIHAISDCEAVLAVRIGPTPEKRLKENGIGAITTYERVK

SEQ ID NO: 106204 - protein, 145 aa, Unknown
  Obtained from environmental sample
  DOMAIN (1)...(113): Response regulator receiver domain
  misc_feature (1)..(145): Xaa is any amino acid
MRIMIIEDEDALREVLEFSLGRAGFAVDSHGNANDALIAVEDCPPDLILLDLMLPGLQGLQFLDILRRKDPALPVIVISARNAETDIIKALDQGADDYVPKPFSVKLVEAKIKAVLRRRSGEGRAARCESGGVAIDFNARKALNG

SEQ ID NO: 106205 - protein, 226 aa, Unknown
  Obtained from environmental sample
  DOMAIN (8)...(226): DNA topoisomerase
  misc_feature (1)..(226): Xaa is any amino acid
VREALEHPRELNGHLFDAQQARRVLDRLVGYKISPLLWKTIKRGISAGRVQSVALRIIVEREEARRAFTPEEYWLFRAMLAGKTPPAFKAELHKVEGKKARIPDAAAAEALENAIRKQPFVVAEVQEKERTKTPAPPFITSSLQQAANQRLGYSAKRTMNIAQRLYEGVDLQELGTTALITYMRTDSFRIADEARAAAKAFIEEAWGKEHLPDKPRYYKSKSGAQD

SEQ ID NO: 106206 - protein, 171 aa, Unknown
  Obtained from environmental sample
  DOMAIN (6)...(119): Response regulator receiver domain
  misc_feature (1)..(171): Xaa is any amino acid
MSTEQKKIIIVDDNPENLGAIKNTIKDKYEVFPASGASKMFELMEHVTPDLILLDIEMPDMNGYEAAKALKKNAKFCNIPIIFLTAKSDPESEMEGLNIGAVDYIHKPFVGPLLLRRIQTHLSLIEYQKMLEAHNRSIEEMLEIRVREVMNLQISVLNIVADLVECRDELI

SEQ ID NO: 106207 - protein, 267 aa, Unknown
  Obtained from environmental sample
  DOMAIN (203)...(267): MutS domain V
  misc_feature (1)..(267): Xaa is any amino acid
GQIEEELCPLNESPNGGSFCFESPEAQLLTDELKKLNALKELLDRTIADDPSILLNEGNLIRDGFNAELDRLRELKNSGRELLENYLEEERRETGISGLKIKYNRLIGYFFEVTNVNLSKVPSRFIRRMGTAGGERFTTDRLAALESEINGASDKIVELERKLFLEIRDGAKQLLRELTAAGKRIAEIDVAQSLAREATIRGWVRPVMESRNRTAIVEGRHPIVEAHLARGEFIANDVFLDASETDNGAIFALITGPNMAGKSTYLR

SEQ ID NO: 106208 - protein, 270 aa, Unknown
  Obtained from environmental sample
  DOMAIN (13)...(95): IPT/TIG domain
  misc_feature (1)..(270): Xaa is any amino acid
MGLLFTRCKEVLPVITSIDPRIGIMGENLTIYGENFGKEQNESYITIAGAAPTGSSYISWQDDKIIIRVPEFAEPGLIYVHREGKKSNPILFANRASMPQTVQGNELSNVPQITNLEPKSGAIGSLISIQGSNFGSSRDRSTVWFTWEAESSLSAPLGHRSSENVEVFDNDFGYEFWSEREIRVRIPDGAISGNLEVRTPRGASLPVFFEITGKPGVKTLKEKRSYTLSYAVDIQVEEAELPNAMYLWIPKPVSSASQRNIQILSRNTEP

SEQ ID NO: 106209 - protein, 188 aa, Unknown
  Obtained from environmental sample
  misc_feature (1)..(188): Xaa is any amino acid
MNNIQIKFINTQKTVTCPYSTIASTLVEHFDVPQEKIAAIRENNEIRPLGATLLANASVEPILIDSSEGVAIYRRTLSFVLAIAAQKIFPKDGVYVGHSLGYSYYYTLSSGDKPKESDIKKLEDEMRALIKENLPITFKYLSYEEALQLFKKNNQTDTVLLLEHRSSPLIRVNECKDYMDIYIQTASS

SEQ ID NO: 106210 - protein, 238 aa, Unknown
  Obtained from environmental sample
  DOMAIN (9)...(230): Domain of unknown function DUF81
  misc_feature (1)..(238): Xaa is any amino acid
VHKKLGNVSGALAVAFLAGSAGGTFIGGAINKGLYDKDPLLSEVFISSIYAVLLGFLGFYALYDFISASRQRGAGSGDARGGPSGVTPLAGRLQAVTVPPMITFDEDLVSGGRRISGWIVAAGGMVVGVLAAIMGVGGGFVTFPLFVYVFGVSSMTTVGTDILQIIFTAGIAAIAQYAVYGFVFYTLAMGMLLGSLLGIQIGALTTKVVKGIQIRGFYALSILAGFVNRVTTLPKKLG

SEQ ID NO: 106211 - protein, 262 aa, Unknown
  Obtained from environmental sample
  DOMAIN (1)...(261): 4-alpha-glucanotransferase
  misc_feature (1)..(262): Xaa is any amino acid
EASWKEWAKKEKPKESDVVFQQWMQWVAEEQFLKAVGELNKLGVRLKGDIPILINEDSADVWHSPQFFSLENRAGAPPDMFCYSGQNWAFPTYRWDNLEKENFGWWRDRVKHAAKFYHAYRIDHVLGFFRIWVVPEVEHTGILGHFVPSVPIYMDEILQAGIPRETVHYLTTPNFGEEQLGHWFSFDTESVKQKYFEHLRDDRYILRSEYRSERAIISLQEEQHIKDALLNVYWDRIFVPSSTEETLWPYWYWYNAPVLLTL

SEQ ID NO: 106212 - protein, 219 aa, Unknown
  Obtained from environmental sample
  misc_feature (1)..(219): Xaa is any amino acid
MAVVKQMQRDFKKSYEILCDVLKYENPQNSDVEKVFISLGYTLFHSKNLTEAMECANKILRQVNSESEKALKLKGTILHTQGDYKGAWECCNLIFSLTPNSPEGHLLAGIIAFSEKNYRKAFTHYNKARKIGRSYSFTLYNSIATVLSKLQKFPLALKVYRYILSIDQNPAHRNSANKSINFFESMAARKQLENMDAVNQKDNSRFELPAYEILKRHQK

SEQ ID NO: 106213 - protein, 65 aa, Unknown
  Obtained from environmental sample
  misc_feature (1)..(65): Xaa is any amino acid
MSVLEIMGYASSLLVAISLMMSNHFKLRIINFIGAVIFAAYGALLTPPAFPVVFVNSLIACTNLY

SEQ ID NO: 106214 - protein, 282 aa, Unknown
  Obtained from environmental sample
  DOMAIN (155)...(202): Regulator of chromosome condensation (RCC1)
  misc_feature (1)..(282): Xaa is any amino acid
TPSRRAPRFNTTAKVATPTDAKTDTSAAKVGQVTGTTGWATVSAGKGHTAALKADGSLWTWGMNNWGQLGNGNTRDRDTPYKVGAAKSWVAVTAGDNHTVALGADGSLWAWGMNYSGQLGDGTNTSRDFPVQVSPAKDWTAVAAGRYHTVALKADGSLWAWGINNWGQLGDGTTIDRNAPVQVGAAKDWTAVSVGDNHTLAIRTDGSLWAWGMNNYGQLGHFTRSDMGSAPARVGAAKDWVTVAAGRYHTVALKADGSLWAWGLNNCGQLGDGTDWTGTPQS

SEQ ID NO: 106215 - protein, 259 aa, Unknown
  Obtained from environmental sample
  DOMAIN (25)...(201): Radical SAM superfamily
  misc_feature (1)..(259): Xaa is any amino acid
MQFWYPAFVYFTRRFGERLQKIVLDRPGATCPNRDAATGRGGCVFCNPYGSGSGLAEAAPDIFLQWEHWRAHYGAKARLFMAYFQSFSNTCGPVEDLRALLASAETLPAVAGIAIGTRPDCVDEAKLDALAACTLPEVWLELGLQSAHDATLARIRRGHDVAASERAVRLAAERGIKVCGHLMAGLPGEGAEEFMAGVRWAAALPLAGIKLHNVYVARDTPLEQDYRSGAYQPLGREEYVALAAEALTLLPARMVIQRL

SEQ ID NO: 106216 - protein, 276 aa, Unknown
  Obtained from environmental sample
  DOMAIN (1)...(66): Ribonucleotide reductase, all-alpha domain
  misc_feature (1)..(276): Xaa is any amino acid
GKDPAGKLLEDARTMFWRVAAAIAEQEPKKSPYTRADLAREFYGLMTSWKFLPNSPTLMNAGSDLGQLSACFVLPVGDSIEEIFDAVKHAAMIHKSGGGTGFSFSRLRPKESRVGSTGGVASGPVSFLRIFNTATEQIKQGGTRRGANMGILRVDHPDILDFIRAKEVEGEFNNFNLSVGLTEAFMCAVEADAEYPLVAPNTREERGRLKAREVFALLVEKAWQSGDPGIIFLDRINRDNPTPGQGEIESTNPCGEQPLLPYEACNLGSINLSAFF

SEQ ID NO: 106217 - protein, 276 aa, Unknown
  Obtained from environmental sample
  misc_feature (1)..(276): Xaa is any amino acid
SDAGLDEFCKSIAAQSREERLISETKEGRLTGLCAIHPFTGEPLPVFAANYVLMDYGTGAVMGVPAHDERDNEFAKKYSLPIPKVIETPSESDPWEKGTLVNSGPFSGMASDQAVDAMIQKLGGRAEKVVTFKLKDWGLSRQRYWGTPIPTVHCEKHGVQPVKEGDLPISLPEDITFTGVGPSPLTTSASFLKATCPICGGPAKRETDTMDTFVDSSWYFLRYLDPKNDKLPFSKAEADAWMPVDLYIGGIEHATAHLVYARYFHKVLRDLGWWLR

SEQ ID NO: 106218 - protein, 103 aa, Unknown
  Obtained from environmental sample
  DOMAIN (3)...(70): Phd_YefM
  misc_feature (1)..(103): Xaa is any amino acid
MTAIIKSSSELRKNYNSVAEICRTQKVPVFLTRNGEGDMVIMDIETYNRREEDLVLAQRLAAVEIARATGVKDLTLNEFERNMRKVINERVRTSKGEALHFNK

SEQ ID NO: 106219 - protein, 256 aa, Unknown
  Obtained from environmental sample
  misc_feature (1)..(256): Xaa is any amino acid
MREENKWLASLCEKRKYTQIISDNRFGFYNKKIKSIYITHQLRIAFPQYCTPFEKIGERWHKGIMKNFDEIWVPDYEEFPGLAGKLSHPSYADKRIKYIGPLSRLDLQDAEQGRGEPEKSIDILALISGPEPQHSIFEKHAIRLLTKNPGNNCIVRGLPNETQIPDLPFETHNHLSAVDLREKILASRTVLCRSGYSTLMDLALLKANAILVPTPGQTEQIYLAELWRKALRINQYIAQCGIASRRKAEALIWKAG

SEQ ID NO: 106220 - protein, 225 aa, Unknown
  Obtained from environmental sample
  misc_feature (1)..(225): Xaa is any amino acid
MTGAMNEGITGSRTVKVLVAEDQCLTEYKGITDEYRVHANRMARLKAVFFPTVFFIGSAATALVLGYGGWEIAVMGADLAILAIFLQYAGGFFEPVQNIANIFTEFVSAQANVERVCGLLEQNPSITEKPEVIEKYGDTFNPKKENWEPLTGDVEFKNVTFKYPDGTENVLEHFNLHVPRGTYAAIVGETGAGKSTLVNLVCRFFEPTEGEILVDGIDYRERSQL

SEQ ID NO: 106221 - protein, 207 aa, Unknown
  Obtained from environmental sample
  misc_feature (1)..(207): Xaa is any amino acid
MQAPAPVPSRPEPPAKAPNHKESAKAGRKEPVVVAPSCPEPVPCYQEPATLLGIYKNQYKEVETLSDVVSFPLPGIVQYTTAAYIYYVDAAHGQNKFSMGVYSLVNGKEIELATLFIKGWEKNVVKMIIREFLLAQNIQSLADYSYTQKEDDFVPEHMRISSSGMEFVYPAYKIAPHSVGEQSVFLSWNTLKPYLNKKSIIYPKLQF

SEQ ID NO: 106222 - protein, 274 aa, Unknown
  Obtained from environmental sample
  DOMAIN (1)...(251): Melibiase
  misc_feature (1)..(274): Xaa is any amino acid
NGRLVPDKNKFPGGIKALAEYIHSKGLKFGIYSCAGTHTCAGYPGSFEHEFVDALTFAEWGVDYLKYDYCYKPRNVAGEDLYKRMALALRNCGRNIVLSACNWGNDGVQKWIRESGCHLYRSTGDIQNNWKSIEGIMLSQLDNACFSGIDCWNDMDMLVVGMGGSGENSYVLSTGCNETEYKTHFSVWAMMNSPLMIGCDVRNMPDQTAAILTNKDVIALNQDIEGRAPYCIRQWNNLDNVFSLVKPLSAVSNGDADYAVAMVNISDVKAEMSL

SEQ ID NO: 106223 - protein, 264 aa, Unknown
  Obtained from environmental sample
  DOMAIN (8)...(247): Bacterial extracellular solute-binding protein
  misc_feature (1)..(264): Xaa is any amino acid
MQEFIRNRQILDLTTYMNANNYKAKFLDNAINQATYQEKIWGVPMQNVAIGLFFYNKEIFNKYRLAVPTTIRELETVCDTLKKNNIFPFALGNKTQWTGSIYYMALATRRGGIQPFIKAVDGSGSFTDPAFIYAGEKIQEWVKKGYFITGFNGLDWDSGQARAPIYRGEAAMVLMGSWFNMQALSENPVYHSKMGFFKFPRDEQGTGNPDTAFGTIGDNFYHVSASSKNPAKAFELISCLIDDTAVKDAISDGRIPPIKGVNNM

SEQ ID NO: 106224 - protein, 231 aa, Unknown
  Obtained from environmental sample
  DOMAIN (69)...(229): Binding-protein-dependent transport system inner membrane component
  misc_feature (1)..(231): Xaa is any amino acid
MKYDPVYEAFLRRLALLLAVVWLVISGAPFVFQIMTTFKSQGEFITNGLFQLPQSLNFKNYITVLRSGFHVYFLNSMIVLAISLTLLLFLSAFAAYPLSRMQFKLNKPIYSAIVAAMSIPIHITLIPVFLMTIRFNMYDHVYALIGPNVAFNLPISIFILTSFMQGISKEMEEAAEIDGCGKFATFFRIMFPLSKSGLATLAIYNGVVIWNEFVFAMVLTQSQDVRTLPLA

SEQ ID NO: 106225 - protein, 49 aa, Unknown
  Obtained from environmental sample
  misc_feature (1)..(49): Xaa is any amino acid
TELMATYMYKMSFIRFNMGYGAAVAAGMFILITLAALIVVNTLNRKAEV

SEQ ID NO: 106226 - protein, 254 aa, Unknown
  Obtained from environmental sample
  misc_feature (1)..(254): Xaa is any amino acid
AGIAVSLIPIIVTVIVADGMIRGITDRYIELGTGHLQVYDLMGFGEIENNISRIKELDKIKGVWTEQRGMGVLAGKTGRMGVTVRSIESSFWEDPDSVRFLKIIDGGQKPETDRDIVLGETLASGIGVRVGDTVRLMTVRNADNGRLIPKSASFTVRGILSCGYNELDALWCIINTEGGMRVLSPDQVSASLIVKVDDPYNITDTFIWDIYDKLGGGYSIYTWKDLLQSQYSSYESTKQLLLFIMALIVLVAAV

SEQ ID NO: 106227 - protein, 278 aa, Unknown
  Obtained from environmental sample
  DOMAIN (1)...(278): Histidinol dehydrogenase
  misc_feature (1)..(278): Xaa is any amino acid
FADFEYEMEKGLFTGQRVIPVQRVAIYVPGGRFPLISSVLMGLVPAFCAGAEEVLFASPPLEDGLPDRRIMAAAMIAMEACRGQREAAAEGRLRVFAMGGAQAIAALALGTESVPKADFIAGPGNKYVAAAKRLLFGEVGIDFIAGPTDVLIIADGGQEAAGSAADLVAADMIAQAEHDPDARARALVPDRAFAQLITAAIEQRLASLATTATARASLDNGGLIIVYQNREEAVRIANIIAPEHLELQTADAGEWIPQLKNYGSLFSGGLFAEALGDY

SEQ ID NO: 106228 - protein, 276 aa, Unknown
  Obtained from environmental sample
  DOMAIN (123)...(275): MatE
  misc_feature (1)..(276): Xaa is any amino acid
MEYFVIYSAGSVFVAINMILATIIRSYGHSRGPMLVNVLAMAISVCGNYLFIFRNFGDTLRGLSVIDVSVIQGVALSTVASQITATGILYVMMKRRKDIVLEKGGLFKVPAAVYRRILAVGVPTAGENLSYNLGQIIIMRMVSALGTDAMAAFVYAITVLRFVFITSISIGSAVQIKVGYYVGAAMAGIAQRKVYRYFLIGTAISTGLVLTVKLLQFPIINTFTQNPEIQTMAFGVLMVALFHEPGRNFNVIIIPALKGAGDVRYPVYVGMIFMWG

SEQ ID NO: 106229 - protein, 270 aa, Unknown
  Obtained from environmental sample
  DOMAIN (190)...(215): Leucine rich repeat variant
  misc_feature (1)..(270): Xaa is any amino acid
DAVIAQSVERGIKPSVYQIFDGYVVVGYSRKDSRKLLGVEEPPRQEEPPPPESAAQEPAAAEPMPVPETPDIQSIAKKPSKISGITPKKLAAAALLGVTIASVPFAVNKLKDNYYEAEEAAEPQAAKNTLPNINEGGGGSPDILAAIAANAPLPDYNIEKLINGGYMKDVAQNPNISGEMLQRFASDADPLVRAAAARNKTLPEEILRRLASDKSPEVRASVASNPNLPPDIFNKLSLECEGAVCSAVLENPNLTPSLLDRLEPNIANAT

SEQ ID NO: 106230 - protein, 239 aa, Unknown
  Obtained from environmental sample
  misc_feature (1)..(239): Xaa is any amino acid
MTGGPDRHGIEWVYVPVTGGSMVRPGCPILKNANDWEKVISFPDVDKWDWEASKEANKDFIKHDLFIIFSILTGFFERLISFMDFENAAIALIDEDQKTAVHGLFQELVKLYNKMIDKYVYAYRANLVSLHDDWGSQRSPFFSLQTVMEMIVPYIKQVVDHCHEVGIFYSQHSCGKNEPLVPAYIATGADDWGSQLINDMESVYNSYGDKIILSMPSGLRLKEDGWTVLSGPEEAAQCA

SEQ ID NO: 106231 - protein, 260 aa, Unknown
  Obtained from environmental sample
  DOMAIN (43)...(260): Cellulase (glycosyl hydrolase family 5)
  misc_feature (1)..(260): Xaa is any amino acid
AVNTAGSPKDEPEIMPIKTALQYLNDEGIKIGINTGDTLDAVDDWTDENKPVSIETAWENPEANQTYFNGLKTLGFNIVRIPVTWTGHIGIAPEYKIDGAWIRRVAEVAGYAETAGLKAVINMHHDGNQDFKGWLDINRAMANTDDRSRIAAQYEAVWKQIAGHFKNYGDWLMFQGFNEIHDGSWDEGDGDDAAAKYAVINDWNRRFTNAVRGSGGSNENRYLIYYGYNTSPAIADAGTLFKLPADTEAGGQIVAFHFYY

SEQ ID NO: 106232 - protein, 57 aa, Unknown
  Obtained from environmental sample
  misc_feature (1)..(57): Xaa is any amino acid
MGTISVEYSSNLYWLGRYAERAYTTLNTFFNYHDKSLDKDKNAYKEFLETWTSRTST

SEQ ID NO: 106233 - protein, 283 aa, Unknown
  Obtained from environmental sample
  misc_feature (1)..(283): Xaa is any amino acid
DRSTIEVFGDYIDIYDMTQAVEDGATRPIFYESRVIHFKLEEDILGQIDAEYDRVAERAEPYVIEKSKKELGRMESILGAEETIQSLCADIVKHYEENRQHELTGKAMIVAYSRPIAMKIYHKLLEMRPNWQDKLGVVMTSDNSDPEDRREIVGNKRHKEEMAGKFKNDDDPLKIAIVVDMWLAGFDLPSLATMYVYKQMAGHVLMQAIARVNRVFKDKEGGLVVDYVGIARVLKQAMNDYTRRDRKNFGDTDVAKTALPKFIEKLEVCRSLIHGFDYSGFMD

SEQ ID NO: 106234 - protein, 216 aa, Unknown
  Obtained from environmental sample
  misc_feature (1)..(216): Xaa is any amino acid
MPLSWNLPPSPTTCKWSGEVPLRYEIKTRAAAFVNDWKDKAPTAREEADAQSFQIEFFNIFGVDRKKVAVFEDKVRLYKDHQQGLFTDTAAGPSGYIDLLWKGHILIEMKSPGKDLEKAYEQAKTYALALDKKDFPKSILICDFVNFHYYNLLEDGKAYRFQLPQLLENIELFGDLAGYRETDPFKRWDPVNIEAAVKMGELHNRLKEIGYSGRSL

SEQ ID NO: 106235 - protein, 193 aa, Unknown
  Obtained from environmental sample
  misc_feature (1)..(193): Xaa is any amino acid
MFAIFKRELRAYFQTPIGYLYMGLFLLLTGIFFTFYNIFPQSSQFTNFIGNILIIYLFTIPLLTMRLFSEEKRQNTDQLLLTSPVSITAIVCGKFLAAFAVYCATLAFTALYTVVIALYGDLQGWETIGSYIGFIFLGASYISVGIFVSTVTENQLTAALVSFFALMIIWLIDPLAQMVPSDTRSGIIPAIIF

SEQ ID NO: 106236 - protein, 73 aa, Unknown
  Obtained from environmental sample
  misc_feature (1)..(73): Xaa is any amino acid
MKSQEDGTVDAIAEAAEDTDIRRDLFRALAAADIPILMMRSLDMSLEDIFLNLTTKELTTKEAGSLNSNGEEK

SEQ ID NO: 106237 - protein, 85 aa, Unknown
  Obtained from environmental sample
  misc_feature (1)..(85): Xaa is any amino acid
VTESLPESHPATQLNILSFGFKHGLPQEADVVFDARILPNPFYVPELRPLTGRDPEVIAFLERQPEFGEFLGRVEDWALWSWPHV

SEQ ID NO: 106238 - protein, 93 aa, Unknown
  Obtained from environmental sample
  DOMAIN (17)...(40): 4Fe-4S binding domain
  misc_feature (1)..(93): Xaa is any amino acid
MGNKLNEKLKKIYTGHVYADASRCKACWDCLSACPSQVIGKVSFLWHKHIVLRKSDNCTGCKKCVKACQHGVFSEDLPDAFRGITQCLGITGQ

SEQ ID NO: 106239 - protein, 207 aa, Unknown
  Obtained from environmental sample
  misc_feature (1)..(207): Xaa is any amino acid
MVEVYSTGAYLINGSQIIKDDADAAGKLKQAGVSVSKDDARKGTIACGILSAHNSSGADGGDEHNLRLKFDSLTSHDITYVGIIQTARASGMEKFPMPYVLTNCHNSLCAVGGTINQDDHVFALSAAKKYGGIYVPPHLAVIHTYNREMMAGCGKMILGSDSHTRYGALGTMAVGEGGGELAKQLVGRTYDIARPQVVAVYLSGKPA

SEQ ID NO: 106240 - protein, 77 aa, Unknown
  Obtained from environmental sample
  misc_feature (1)..(77): Xaa is any amino acid
YAKWNINLYTVTFDSNGGSGVVEQKIEHQKKLIYPINPTKKGYIFRQWCTDKELTEEFDFSTEITENITLYAEWFGG

SEQ ID NO: 106241 - protein, 58 aa, Unknown
  Obtained from environmental sample
  misc_feature (1)..(58): Xaa is any amino acid
MFTYFSDIDFENHVTHFYPDFYNDKLIIGKFCQIASGAEMAQLLEQKALWEAMLSHIQ

SEQ ID NO: 106242 - protein, 55 aa, Unknown
  Obtained from environmental sample
  DOMAIN (8)...(48): Bacterial regulatory protein, Fis family
  misc_feature (1)..(55): Xaa is any amino acid
KATAGMTVAQMEKELIYATLEHCKNNKTQAAEMMDISVRTLRNKLKEYGDDSAEE

SEQ ID NO: 106243 - protein, 260 aa, Unknown
  Obtained from environmental sample
  misc_feature (1)..(260): Xaa is any amino acid
DLAAAGITALKIEGRMKSASYVGTVVSAYRLVLDAVAEGDDEQILQSIEHGREILRNDFARPKTQYFFNGNLNTDWLNPDQDGGTGISLGTILKVKGTGDERRAFVSLPHSISLSARDSVRIHRSGDSGRVTHKLTFAKEEKDGWWISAPECSKGDYVYLIQIKEKQKRYAPVIAHNTGSKGPGREKAPFPGILKQAEEKRKKHGEPFPEGLYVSVSRPEDLYIVQSSRPQMVMLSLTQKNIKYLLSQDKQPLPFKPAEI

SEQ ID NO: 106244 - protein, 265 aa, Unknown
  Obtained from environmental sample
  DOMAIN (83)...(199): Histidine kinase-, DNA gyrase B-, and HSP90-like ATPase
  misc_feature (1)..(265): Xaa is any amino acid
LTPLARITGFTKIEDAGNHLLGVINDILDMSKIEANKFELTPAEFNLEKVLRRVVNVVNFRIDEKQQKFSVHVDRSIPRNLIGDDQRIAQVITNLLWNAIKFTPEKGSVTLAVRLVEKVNNTCTLQFSISDTGIGISPEQQRKIFQSFEQAESSTTRKYGGTGLGLAISKNIVEMMGGSIWVLSESGKGSVFTFTIKVQRGTEEKHALLSPDINLDNVRLITVDDDPDILKYFLEIAHGFGVMCDVAISGEKALQLIDHNGGYHI

SEQ ID NO: 106245 - protein, 255 aa, Unknown
  Obtained from environmental sample
  DOMAIN (40)...(230): ATPase family associated with various cellular activities (AAA)
  misc_feature (1)..(255): Xaa is any amino acid
MGYTVFARKLRPRTFGDMIGQEHIVDTLRRAIEKDRVAHAYVFTGTRGVGKTTAARILARALNCEKGPTPTPCGECPACRDILSGSSLDVMEIDGASNNSVDDIRELRENIGYTSMGGRYRVVVIDEVHMLSKSAFNALLKTLEEPPQNVIFILATTEPTKIPSTIHSRCQRYDFRRVGAERIAAYLAKICETEGVAFDKSALSVIARKADGSVRDSLSLLDQACSFCGESLTEQKVRAVLGLVGTETFRELMKD

SEQ ID NO: 106246 - protein, 223 aa, Unknown
  Obtained from environmental sample
  misc_feature (1)..(223): Xaa is any amino acid
AGNIYAALRLPLTPPFSTEAAAPALSGLLAEALTHLGYQVHIKWPNDIIQSQNNDYSCRRADWRKVSGILLEECAGILIAGIGVNLVSAPPDAALREGAALSAGVLQARNRQAPGKDTKDAAVKESASAGTPAPLFNWWSQLANETFSCYEQKVAGKKSWWPELAEKHLAFQGCLVRVDETPPGANGQGVIDGLCVSGALRLRTPSGLMTFLNGSLMPCGVCA

SEQ ID NO: 106247 - protein, 197 aa, Unknown
  Obtained from environmental sample
  DOMAIN (34)...(194): Xylose isomerase-like TIM barrel
  misc_feature (1)..(197): Xaa is any amino acid
MFQIGLRAHDYGTNLSPEKLADILVEYKPASIQLALAKALTGIPGAGGITTGYARGIRKIFEERGISIAVLGCYINPVHPDPAIREKHLRRFEEHLRFARDFGCSIVGTETGSCNGDCSFHPDTEKPETFDLFCHSLERLIKTAEKCGSIAAIEAVADQHVVSSMEKMQTVMRQFASPCLKVIYDPVNLIPNAGSSR

SEQ ID NO: 106248 - protein, 74 aa, Unknown
  Obtained from environmental sample
  misc_feature (1)..(74): Xaa is any amino acid
MAKQRDRTAAQLLRDFMREYVAKSQQVLEYDAWFRGKVAAGEQAYREGRFITQEEATRRAEQRRAEILRSAGAR

SEQ ID NO: 106249 - protein, 246 aa, Unknown
  Obtained from environmental sample
  DOMAIN (38)...(237): Mechanosensitive ion channel
  misc_feature (1)..(246): Xaa is any amino acid
AILVLVIGRVLSRGTQRLIRKASSSGLQVDETVTSVLRGIVRYGVFIISVIMILNIFGVNTTSLLAVLGAAGVAICLALKDTLGNIASGIIILLIGSYRKGDFIEFGSFMGTVQDINLFTTILETPDGINISAPNSCIWGTPLRNYTRNGRRRMELSVGIAYSDSVDTAFQVMREIIAAETRLLKEPAPQVVLQSLDSSSVKITVRAWASIQDYWDIYWELNKSIKSKIEAAGLHIPFPHIRIVQD

SEQ ID NO: 106250 - protein, 256 aa, Unknown
  Obtained from environmental sample
  misc_feature (1)..(256): Xaa is any amino acid
VLDAATFAVFQEGYKKGFGADGDHLKTAKDVEYALSLGFTMITLDCSEYIKNDITLDNAPPLPKQYEDKYLNKKFEIEERITLVFNEGDLRQCVAIYADAIAFAAEIYKQFFASGKYNADFEISIDETASVTTPLQHFFVARELLDAGVSFATIAPRFCGEFQKGIDYKGDISQFEKEIKTHAAIARHLGYKLSIHSGSDKFSVFPIIGRETCGAFHVKTAGTNWLEAMHVVAFADPSLYREVHAYALESFDEAKK

SEQ ID NO: 106251 - protein, 255 aa, Unknown
  Obtained from environmental sample
  DOMAIN (2)...(255): Glucuronate isomerase
  misc_feature (1)..(255): Xaa is any amino acid
ELSVKGIFEKFRVYAVGTTDDPADSLEYHRAIADGTAPIGKIATKVIPSFRPDKALNINLPGFSAYIESLAKVSGVAIKSADDLLAALGKRLDSFASLGCRASDHALEYAPFVLASDSQVDKTFQDAMAGKEITKECADTYKTKILCGLAKLYADRNMAMQLHLATIRSVNSRMLKRVGPDTGYDAVHDREQSANLAALLNRMESAGEKPSLPKTILYTLNPKDYYPLATIMGGFQDNYAKEESRSGIAGKMQLE

SEQ ID NO: 106252 - protein, 263 aa, Unknown
  Obtained from environmental sample
  DOMAIN (3)...(261): Nitrogenase component 1 type Oxidoreductase
  misc_feature (1)..(263): Xaa is any amino acid
MEGRLYVVITGCVTEIIGDDIRSVTSEFADRVDIVAANTGGFKGNSYLGYDIVLSEIVKRYVKKGADKKKKSVNILGIVPYMDCFWRGNLIGVRRLLEKIGVQVNTFFTDEDTLDGVKNSSSAELNIVLSDVYGLETAKTYEETHNITYITATLPVGPTASAELLRAVAKALKLDVDVEAIIEAESRRYYKYITPLVDVYNDVDLQKYSVIVGDVNYAVALTRFLTDDLGWSPVLVQFTDPLNNEQQAQISAKLKGNGIFADP

SEQ ID NO: 106253 - protein, 48 aa, Unknown
  Obtained from environmental sample
  misc_feature (1)..(48): Xaa is any amino acid
MADSAFNPFEMAQRQFDGVAEKLGLDSGTREFLRVPMREYHFSIPVRM

SEQ ID NO: 106254 - protein, 244 aa, Unknown
  Obtained from environmental sample
  DOMAIN (56)...(244): Cation efflux family
  misc_feature (1)..(244): Xaa is any amino acid
MNAKMALQVAPLSIDDGLDGRADAWEKASMGARMILQEGKMTENPSTSQRVRQRAAMLSVVVGVIILAAKYYAAAVSGSAALWSDAIESVVNVIGAIFAFGAVRLAERSADREHPFGHGKVEHFSAAFEGGLIAIAAALIAWEAITILYQQLFLGTDTIKELGLGLAWNLAAGALNGLLGLLLVFIGKKHQSDALKADGQHVLSDFWTTLGVLLGLLLVKLTGLNWLDPLIALLVAVLLAKTGR

SEQ ID NO: 106255 - protein, 274 aa, Unknown
  Obtained from environmental sample
  misc_feature (1)..(274): Xaa is any amino acid
ERAGRKDDTDVAVEVRVTAPGGGETYTGTGVIPAGETAGVVEVRVPQVRRWWPIGHGDQTLYQVDVAATTMPAGPKAGITGQVYQMSAVAKADTAKEFTTATDHWSGRVGFRTVHVDTVDDAAGAPFTIYVNGERLLARGVNWIPDHAFLTKVTPERYARGIKDAVESGVNLIRVWGGGIYESDVLYDLADEAGILMWQDFLFACAAYSESPEMVAEVDAEVRDNITRLSPHPSLIIWNGNNENIWGSVDWGWSGLLRGRPWGDYYYSHLLPDV

SEQ ID NO: 106256 - protein, 261 aa, Unknown
  Obtained from environmental sample
  misc_feature (1)..(261): Xaa is any amino acid
MLVGTFVYVAGDGLVSRTLLAHNFTRYPLDCREKRQEAKSWIVPIAAIMVTLCFTYSVTMLGLHKAGGTLESMKGSALSSIWIPLIVFFISITALALTLKKNTGALYNSVVAQLENLSSEQKDLTKRISICSVDELGTIAGMINDFCEHLGNGIKNIKNEVNVLSDIGNALSSNMNNTATAVNQITANVQSIKGQIQNQSASVSETHATMEQLVTNIKKLNDHVENQSGDISKVSASIEEMVANINSVTGTLVSNAENVKM

SEQ ID NO: 106257 - protein, 195 aa, Unknown
  Obtained from environmental sample
  DOMAIN (6)...(98): Methyltransferase domain
  misc_feature (1)..(195): Xaa is any amino acid
SLSKLLDIGCAYGAFLAAAKEEGFSPQGIDPAEDAVRYVTQTLGIPARQGYFPTPEPRPPTPDCEVVTLWYVIEHLRDCVPALSEIRKLLKPGGVLAFATPSFTGVSGRGSLKRFLENSPQDHWTVWSPTVCRKALGKAGFKVKKIISSGHHPERFPFLGKFAHNKNSLLYRLLMAVSKIFALGDTIEVYAVTLP

SEQ ID NO: 106258 - protein, 214 aa, Unknown
  Obtained from environmental sample
  misc_feature (1)..(214): Xaa is any amino acid
MVKKFDSFIEDYSRSSSTSSIPFELIAHTEPPTLDEPPELDAPSAPATAAVPITQVLPKAPALPSAPTTPATPSAPTTPATPSAPTTPAAPSAPTIPAAPSAPTTPAAPSASNAQAAPSASNAQAAPSAPNAPAAPSASNAQAAPSASNAQAAPSANLVQDIQTDLNNQKIPTEQKKQKKQKLQPANKEQILQDEQDGQIKHDIQRFNLAIPKE

SEQ ID NO: 106259 - protein, 281 aa, Unknown
  Obtained from environmental sample
  misc_feature (1)..(281): Xaa is any amino acid
ATEEDVAVRDQIERDKERIFKEVHQYVRALALRVTTGKQLTDKQRRTAMSHIRRSLESGATVYRELYTSLSGDKEFVRYAENEIQDTGAKGEAQRAAREARGLTAFQRTRLAERIIDKDIAGKIRKGKATQEELENYVRRGEEDLREMDKEIKSLEDELEKSKGETEDERAEAEAWYRQYQKTKAQLEAAVKEAADLQKKLDKAREAKSGMAERIRAGRLKSEADLKEKLAAKRDEIKTLRRRQKEETAHAEKQGRLEKAWQWAEWRKKLDDKNEQRKRKE

SEQ ID NO: 106260 - protein, 281 aa, Unknown
  Obtained from environmental sample
  DOMAIN (1)...(281): tRNA synthetases class I (I, L, M and V)
  misc_feature (1)..(281): Xaa is any amino acid
DANVVEKKLAQEGRKRQEIGRERFLEEAWKWKEEHGSTIVKQLRKLGSACDWTRERFTMDAGLSRAVREVFVRLYKKDLVYRGEYIINWCPRCGTALADEEAEHKEIAGTFTWIRYPFAESREGDPDGIVVATTRPETMLGDTAVAVHPADERYARLVGRELVLPLCNRTIPIIADTMVDRDFGTGAVKITPAHDPNDFQTGARHNLPRVNVMREDGSINANAPEKYRGMDRFACRKMVLADLETGGFFVKQDKIQHSVGHCYRCDTIVEPYLSRQWFVRM

SEQ ID NO: 106261 - protein, 283 aa, Unknown
  Obtained from environmental sample
  misc_feature (1)..(283): Xaa is any amino acid
RGKRVYLTAGDNDPVTVKLTATDAFDPGEGDGTFTYSITYPGSAAAVITLLNWADLTEEIEVTGTPGTADGDGIVTQTGTTDPADLPAGIYLLTVKLTADGGKSAGVTEAVHIYPDAVTNYTKAFTADDLIVRPALLTVSFNTNGGTPETIPEVHLFAGQTLGGNFSFPADPTPPTAGQTFLGWFVGGAEGNKYENTTPITASVELKAEYAFVPVAVTFNTDGGLPVSIAAASVIPGQSLGTSFPKDPIKADDGNNWFVFDGWYDASDVKYASDTPIAVATVL

SEQ ID NO: 106262 - protein, 251 aa, Unknown
  Obtained from environmental sample
  DOMAIN (43)...(222): ABC transporter
  misc_feature (1)..(251): Xaa is any amino acid
MKISARDLFFDYSGANAHAVSAYPHAYPRVFGGLSAEFDLDGGGPLVILGPSGSGKTTLLKLLGGLLKPDRGEVVFNGDGTGRADEAPKIAFMFQEPRLLPWMTVLENVSLQLEKEFGRAEARRRAVRFLSLVSLEGKQGAYPGELSGGEAHRVSMARAFAWPADALFMDEAFQSLDIPLRISLMDMTLSLLETEKRALVAVTHDPREAVYIGGRIVILGAGGRGIVYDRAVSFSREERVYGSAASGELER

SEQ ID NO: 106263 - protein, 272 aa, Unknown
  Obtained from environmental sample
  misc_feature (1)..(272): Xaa is any amino acid
MKSEFDYASATPNHREPAEKAAERSRSGLTPDQAPVDAHYCKDERQLLTDLMKYIAARDPDVLTGADIADRTLRVLQERCLKLGLRFEIGREGGSRVYASTRNVRRRDGRASAKTVWNARVPGRVVMDLATMLRAYHRSSDDDCHIDAADAPAAAAEALNLFNDAEILPNAIERSRRSGQALDSIGGSVASFDHLYLPRLHRAGFAAGDTADIRPPTKALPGGYVLEPAPGLYENVLVFDFKSLYPSIIMTFMIDPLGFRIAGGNRIATPIG

SEQ ID NO: 106264 - protein, 135 aa, Unknown
  Obtained from environmental sample
  DOMAIN (12)...(135): Peptidase family M50
  misc_feature (1)..(135): Xaa is any amino acid
MILGMTHAEFLIRIPAILLALTLHELSHAVTACKLGDPTARDQGRLTLNPLAHLDVLGTIMLLTGLFGWAKPVPVNPYNLRNPKRDLMLISFAGPLSNIAQALCCGFIIRAIMAYAPANPELVEIPLLKYLLLFL

SEQ ID NO: 106265 - protein, 261 aa, Unknown
  Obtained from environmental sample
  misc_feature (1)..(261): Xaa is any amino acid
MIPNYMLKIQGEHAKRRSDPSLYAIYDRSSGATDPSSVAKIKLNMIGGQNWRVAGQWIEWEFYVPEDGMYRFTVKGRQNYNRGFVSNRTAMIDGQIPCVELSAVPFTYSNKWKLTTFRDRQEDMVFPLEEGMHTFRLQAAMGGMGEMLSVMEESVFRLNAIYRKILVLTGTEPDIYRDYRVDVVYPEIIKAMALESKILYKLVDDLTAYSGERSAQAAATLTLARQLELFVRRPDKIPRTLVNFKFNISALGDSLLALSQS

SEQ ID NO: 106266 - protein, 110 aa, Unknown
  Obtained from environmental sample
  DOMAIN (3)...(109): GTPase of unknown function
  misc_feature (1)..(110): Xaa is any amino acid
MGFKCGIVGLPNVGKSTIFNAITNAGAESANYPFCTINPNVGMVNVPDKRLDVLVKAYKPKSIVPAVTQFVDIAGLVKGASQGEGLGNQFLTHIRECEAIMEVVRCFDDE

SEQ ID NO: 106267 - protein, 95 aa, Unknown
  Obtained from environmental sample
  DOMAIN (1)...(94): Cytidine and deoxycytidylate deaminase zinc-binding region
  misc_feature (1)..(95): Xaa is any amino acid
LLYALELATYAIKSCRPNPAVGAVIVKDGVAVGQGYTQEPGKEHAEIVALKSAGENAKDADLYVTLEPCSHYGRTPPCADAIIKAGIKKGFTTGI

SEQ ID NO: 106268 - protein, 146 aa, Unknown
  Obtained from environmental sample
  misc_feature (1)..(146): Xaa is any amino acid
MNRLDKSIDSIIENYDTYGMVNHSGGENLPGRESIENIMRGLEELLFPGFLENVRTDNGNLRTITIEKVKKITCELTHEVEKSLAFSVRIGTLSCGHGGCRAVAALVVDEFFEELSKIRTLLSKDLEAAVRGDPAAISADEVILSY

SEQ ID NO: 106269 - protein, 240 aa, Unknown
  Obtained from environmental sample
  DOMAIN (103)...(223): Transglycosylase SLT domain
  misc_feature (1)..(240): Xaa is any amino acid
MLGRAPKYKFYDVAVTDADAEELKKTKYGMSALALLQVGKNELAEAHLKYLITKNASDGLLHAVHALAASEELPRTAMTVAPVIKERGILEIDGDVILAAQFPLPQWEPRGGWNIDRALLFAIARQESRFKTNAKSRAGATGLLQLMPKTARLTASKSGVKMCNLDLTKAEDSMFLGQQHVRDLFALGNVDNNIVKMLVSYNAGNGRLRGFEKKFETDDPLLYIESFPAAETRQYVKLVM

SEQ ID NO: 106270 - protein, 89 aa, Unknown
  Obtained from environmental sample
  misc_feature (1)..(89): Xaa is any amino acid
MENEMNNRSNSHLKKILSRSLKEFPPFFQSKNSVVFNGDCLEILLSIPENSIDMVFADPPYMLSNNGFTCKNGKMANVNKGKWDKRRRL

SEQ ID NO: 106271 - protein, 146 aa, Unknown
  Obtained from environmental sample
  misc_feature (1)..(146): Xaa is any amino acid
TLTPAPAVHTLLVQNDGEKDENGDYTSLGFVLKGEGLLIYHAGDTWVTPSLIEALKVFETLNIAMLPINGADWERTKENCIGNMNPLDAVKLARALSVDMVFPSHFDMIAHNSENPARFVEAMYALCPEKRFHVFALGERFIYRYK

SEQ ID NO: 106272 - protein, 259 aa, Unknown
  Obtained from environmental sample
  misc_feature (1)..(259): Xaa is any amino acid
MNRRSGLILFSDGETLQGALETALNRARGAGVPIFTVGLGSERGAPVPVEISPGSPEGVLLGSDGSPIISSRQEEVLKNAAQKTSGFYVDANRGNAASPLVDYFRFQSSESAGVLRREQVPRWRIFVLAALISLSLSRLLGYRRKRVSLVSREPSRSFGGSSFGGSSFGGGSIGNGRKAVSTGLLCVFSLLLSSCTPIQGYLLIMEGNFYHSRNRFAEAISSFLKAQAYGYAAPYAEYGLGLSYSALEERDAALVRYSA

SEQ ID NO: 106273 - protein, 240 aa, Unknown
  Obtained from environmental sample
  misc_feature (1)..(240): Xaa is any amino acid
KKFDMKIEQVETVSFMCNKGNGISAANVGVGKTVIGESVVVNRVQTGKAKRPLVVTPKAVYRKWIKEFHQHFPDVVVNELQNFGSEYIARFKAGDTGLNIPEGTISVCTQEALQKVTFKDETIDTDLIDDMMDSQTIYDAEAQEKRSPKELAEERQNMLKRLGKGAKAKEGALYWEDCGFDCVMVDEIHNYKNVFGQTRSFSGSKKDTESKERQSNEFKGLTGGESDRAMKLFAITQLVQ

SEQ ID NO: 106274 - protein, 277 aa, Unknown
  Obtained from environmental sample
  misc_feature (1)..(277): Xaa is any amino acid
GIQHRSLPSVGLDIKEIAFCLKSKGFHCVVYDKTKKTNTTLKEVINLYIESGIPVLIGLNSENAGHAVLAIGHTNEKIDIPENDVWRDVYNSDRDIIFIDDNKSPYQLAKFNYPTEYYNGAEIFKDMKIKSLIVPLPRYVYLDADCVMPLVNSIFRKGEASLKQFNKNWLTRLLLTNSRSYKSWIVEKGCITDARFKKMLMRIKFPAFIWVCEIYTGNGYINENVSGLLILDATGSNSLSSVLFYCLEDKFYYLSDDGIRWDSQYKMPNSFTIKTYK

SEQ ID NO: 106275 - protein, 269 aa, Unknown
  Obtained from environmental sample
  misc_feature (1)..(269): Xaa is any amino acid
VWKPDAIDGMDAQNIGRMGSTATGQFAYALARDTGEIKPLTAVVVNEVMAQITGPNAKVVVMSDPAPFKNMGKDTYAVRISVPIINKRLNETVGAIGCQLDISMIQPRVEQTIKDFDEVTSMVIYSDNGFVLGNYLPEFIGKQIDTETQYGPYLTKVKDVIKNAQEWEGTAYDPELKTNMVMAVANIPIGVSPTTWSVMVGSTEAYILKDVNAMRNFVIIIASAALLTAMALIYFVLRRTTQPIVKLADTLKDISEGEGDLTRTITVGS

SEQ ID NO: 106276 - protein, 263 aa, Unknown
  Obtained from environmental sample
  DOMAIN (62)...(231): Radical SAM superfamily
  misc_feature (1)..(263): Xaa is any amino acid
AQRYAKELAESLPEADGLFGVDEIEKIAEAVDSLFGNSPSPAPDPCVPALRPLLSLPGSAYIKISEGCNNRCSFCAIPLIRGPLRCRGIQDILGECRGLLARGVKELCIIGQDICSYSDGGSGLVDLLNEISKLPGNFWVRLLYMHPDHFPLPVLDIMERDKRFLPYFDIPFQHASPGLLRLMNRCGTAESYLALAETIRQRLPAAVIRSTFLAGFPGETDEDFACLLDFQEKLRADWLGCFAFSREEGTPAYAMKGRVAKKT

SEQ ID NO: 106277 - protein, 246 aa, Unknown
  Obtained from environmental sample
  misc_feature (1)..(246): Xaa is any amino acid
MLFWKANWIYGVFALASLPFLAVFFIIYFKKFSKTIPGSVNAYDEYFFNIKEGIKGAKDIRILGKADERAKDFEEYVRFQRAQYLSYDRGVALSNAYHTILFTLITVAIIVFAALKVLTPEQASGIVILNTAIQYINKIWTGSHQIFQWFLDVLPRTIFTNKRHQKFYALPETISAGGLKEIPRYDTNIIKLNDIEFKYSNEHKILDKVNIDIEDGKLVSIVGGVDNGKSIIAGIITKLKTATSGT

SEQ ID NO: 106278 - protein, 237 aa, Unknown
  Obtained from environmental sample
  DOMAIN (163)...(237): S-adenosyl-L-homocysteine hydrolase, NAD binding domain
  misc_feature (1)..(237): Xaa is any amino acid
VSCNIFSTQDHAAAAVVVGKNGVPKNPKGVSVFAWKGETLEEYWNCTKRAMEFPNGKLPNLILDDGGDATMLIVRGSQFEDAGKVPTFNPKHDSEEWGVFLALCKKEFAKDPKHWSRIRREVKGVSEETTTGVHRLYEMSKKKELPFPAINVNDSVTKSKFDNLYGCRHSLIDGFNRATDVMIAGKVAVVCGYGEVGKGCAQSLRGQGARVIITEIDPICALQASMEGYEVRCLESV

SEQ ID NO: 106279 - protein, 268 aa, Unknown
  Obtained from environmental sample
  DOMAIN (2)...(263): Aminotransferase class I and II
  misc_feature (1)..(268): Xaa is any amino acid
AQNNAESTIEPIVFPNITYSFYPVYAGLWNIPFRKAALTADLSIKSEDYTQSSGGVVFPNPNAPTGRALGREAIQEIARAQEKNKKVCIVDEAYIAFANGPGMGSVIPFIDEHPNLLVIRTLSKDASLAGLRMGYACGGETLIEGLCRVRDSFNSYTVDRLAQAGAAAAILDRQYYDEINSRVCVTRDRVQKALSGMDFGVIPSQANFIFASPPKASKSAADFLAALRDRGILVRHFTQPEIANYLRISIGNDEDMDTFLAACGEVLH

SEQ ID NO: 106280 - protein, 104 aa, Unknown
  Obtained from environmental sample
  misc_feature (1)..(104): Xaa is any amino acid
MADFEQETISYETMQNTVISMAVEAWRFRRTITHLLNRLDAGERKRYDSSLNWFIKKTGEALEQAGLKVVNYEGQDFDEGMAATPLNMDDFNADDILIVDQSVS

SEQ ID NO: 106281 - protein, 270 aa, Unknown
  Obtained from environmental sample
  DOMAIN (137)...(269): N-acetylmuramoyl-L-alanine amidase
  misc_feature (1)..(270): Xaa is any amino acid
EQDERICDSRDGYIPLNTLVQDMRLELHWDALFGRIDLIRSSKWLTFFLDSRIVLGASGRVDYLEKKILDKDGEISLPVEVLRSFYRELSLPGEMWTFREGSRREMRLTNLAPESNKKEDPKIAQPKPPHGGGINLIVLDAGHGGSDPGFVGYQGMYESTLVLDITKRVEKKLKDLSCRVELTRKGNETVSLMKRSEMANGFLAAGHKGIFVSIHANGSLSTSARGYETYFLSPRASDAEARRVAALENGSLAGDIPQKDEDALDAIFSN

SEQ ID NO: 106282 - protein, 64 aa, Unknown
  Obtained from environmental sample
  misc_feature (1)..(64): Xaa is any amino acid
MTNRVVLLQEIETLPANCISEVVDFVAWIKHRKLSQIPETMLLSEAALSKDWNTPEEDEAWAGL

SEQ ID NO: 106283 - protein, 223 aa, Unknown
  Obtained from environmental sample
  misc_feature (1)..(223): Xaa is any amino acid
MIVINPGGKVILNDGSEIANNGNENKDYGGGVTINIGAVLEMKGGEIARNYSVDPTEPSFSSTAGGGGVLVNGGEFIMTGGRIAENDGANGGGVLVKRGGTFTMGPFILPKYESQIYKNASYEGGGVKVTGAIIDNQNPNALPHQSTFTMKGGRISDNNGTGGGVAVGFRGIFNLENGEISKNTSSDAGGLFNRLGTVYMYGGEISDNRGPWSSGGVLNQGQF

SEQ ID NO: 106284 - protein, 296 aa, Unknown
  Obtained from environmental sample
  misc_feature (1)..(296): Xaa is any amino acid
GNHEPIWEDDEPSVVYKLDTSEGFELFAAKIHNFIDKEGLRAFYVFDCLSDLLKSWRSDMMVGNFFRITCPFLFQLDTLAYFALIRGTHTYDTISRIRETTQLLMDIYIVDNKIYIHPLKVWERYSPTMFFPHLIDGDGAISITSSADTATLFSQVSGSGQPSDYWNITLDHARTLLNGGDKESQEEMKKNLISVVIGKELRITQLAHKYFTLRDVLDIARREIGTGFVGGKSVGMLLARKILETDAQDAMRGHWEPHDSYYLGSDIFYTYIVQNGVVGSADEAENNRGVFYPCQR

SEQ ID NO: 106285 - protein, 243 aa, Unknown
  Obtained from environmental sample
  DOMAIN (1)...(163): Domain of unknown function (DUF323)
  misc_feature (1)..(243): Xaa is any amino acid
MGYNPSVRQGDSLPVENVHWDSVKVFIEKLNATTDTAYWKYRLPTEAEWEYAARGGAASLGDAYSGGGWHDGNSGGQTNPVGGKAPNVLGIYDMSGNVWEMVGDWYGDYDTAAQTDPTGPTYGSYRVIRGGGWSSGVRACRVSHRMKFSQNFSSGDIGFRLAICARKTTAEPPPLSPLALIEPTYVKKRRSEAVADVAVINAAPQREFRLKTRSLRRSDNKMDKGISAGIGGFYVGDYGGGIA

SEQ ID NO: 106286 - protein, 254 aa, Unknown
  Obtained from environmental sample
  misc_feature (1)..(254): Xaa is any amino acid
SSTAGKFEWTTGTTVPNAGTQSYSVTFTPTNTDYNSVTGTVSVTVAKANPTVTWPTAAKITYGATLSSSTLSGGSSTPAGTFKWTDNTIKPNAGTQSCEVTFTPTDTANYNTRTNTVSITVDKAAASIVTLPTASSITIGQKLDDSKLSGGSGSPAGGKFSWNSPNYSPVVVGSISQRIIYTPSTADQDNYTKTDGTHTVNVTVKPKELKFSHDSGLYSGQFSLTLTGEAGDTIYYTTDGSIPVPNKNGTTKYS

SEQ ID NO: 106287 - protein, 74 aa, Unknown
  Obtained from environmental sample
  misc_feature (1)..(74): Xaa is any amino acid
VNKTARRPQLREVVFVDGVRTPFGKARPDGLYAETRADDLAVKAVRELVRRHPGLPTVRIDEVAIAATTQEGDQ

SEQ ID NO: 106288 - protein, 75 aa, Unknown
  Obtained from environmental sample
  misc_feature (1)..(75): Xaa is any amino acid
MVGLVRSLLVAGGRSAGVSLWPISDEAAVGFMERVYRKTLKEGKSFREAYYEVKQEFRKGKWGHPFYHAAFVLYE

SEQ ID NO: 106289 - protein, 90 aa, Unknown
  Obtained from environmental sample
  misc_feature (1)..(90): Xaa is any amino acid
MLLQSEPGSLTILPALPRKWRNGEVKGLRAKGGLDVNIEWKNGELACVSFISKNKYKGKVIYGDTEITVSIDASEVIRLDGCLEITGGIC

SEQ ID NO: 106290 - protein, 70 aa, Unknown
  Obtained from environmental sample
  DOMAIN (2)...(61): FKBP-type peptidyl-prolyl cis-trans isomerase
  misc_feature (1)..(70): Xaa is any amino acid
LEKGEEIPLEMVIPGWAEGIQLMNVGSKYRIYIPSHLAYGERGAGQIIPPYSTLVFTIELLEIIQENSEQ

SEQ ID NO: 106291 - protein, 192 aa, Unknown
  Obtained from environmental sample
  misc_feature (1)..(192): Xaa is any amino acid
YRSNPLRLAEFTLSRKDPSYVQRAKDIKTIEEARQSNKQDPEIAALLNKIQGIQGSANISLSETGIGSAIFARKPGDGSAREQAASCQRVLGASANFALEYATKRYRSNLINWGILPFIITDEKALGLNIWILLPNIQKQVREKALTLKGYVLGDKPSEITVTLGDLTDTERQILLDGCLINHYKEQTAGSK

SEQ ID NO: 106292 - protein, 66 aa, Unknown
  Obtained from environmental sample
  DOMAIN (9)...(66): Ribosomal protein S16
  misc_feature (1)..(66): Xaa is any amino acid
MAAVIRLSRFGKRHHPTYRVVVADRRKARDGQVLEQLGFYDPNLKVSEVRFNFDRVMYWLGVGAQP

SEQ ID NO: 106293 - protein, 83 aa, Unknown
  Obtained from environmental sample
  misc_feature (1)..(83): Xaa is any amino acid
VSGGELPAMLVSDAVVRLIPGVLGDIESAETDSFAQEGLLGCPVWTRPQEFEGMKVPEILLSGHHENIRKWQREQATPYPQCR

SEQ ID NO: 106294 - protein, 254 aa, Unknown
  Obtained from environmental sample
  misc_feature (1)..(254): Xaa is any amino acid
MPTEVMRKIFSESGHDFSSDICPDITIKDLDVNAIEIFRSKWAEKSGNKRIKNLSVKQLLIDCEAMTDNGITYAALILFGTRFALGRFLPQTEIVFEYRSSNASGPAQQREEFRVGFFACYDRIWELINLRNDKQHYQDGLFVFDIATFNERVVREALLNAVSHRNYQLSGSVFVRQYKDRLIIESPGGFPTGVTIENIIDRQSPGNRRIAEILALCGLVERSGQGMNLIYELSIKEAKSLPDFKEQMIIWYVL

SEQ ID NO: 106295 - protein, 97 aa, Unknown
  Obtained from environmental sample
  DOMAIN (1)...(97): tRNA synthetases class II (D, K and N)
  misc_feature (1)..(97): Xaa is any amino acid
AQERYHGILESDPGAVKGDLYDLVLNGFELASGSIRIHDPDLQKRIFKIVGFDPAEAESKFGFLIEAFKYGAPPHGGIAPGVDRLVMLMAGETSIKE

SEQ ID NO: 106296 - protein, 66 aa, Unknown
  Obtained from environmental sample
  misc_feature (1)..(66): Xaa is any amino acid
MRAGSMAITKRAMLSRAIAAIRKSTLIINLPGSPKAARENLEFILPALRHGLDILSCREGECGEKR

SEQ ID NO: 106297 - protein, 261 aa, Unknown
  Obtained from environmental sample
  DOMAIN (194)...(259): Peptidase family M23
  misc_feature (1)..(261): Xaa is any amino acid
GVGGGSFNSEDISLTLVSLNASSLNDASLSDASFEANPFETAVLEPESLSKIRVLLYDTHTVTQGENISTLAVNMGLNQGTLISVNKITNTRLLQIGKVLKIPNQDGILHAVKSGDTLGSIAEKYKIETEDIITANELFSDKIRAGTDLFIPGAKLDWVSLQEINGDLFIWPVNGVITSPYGYRKDPFSGNHVQFHSGLDIRGSTGTPVRAAMAGRVSQTGYDSVYGNYVVVNHHSGYRTLYGHMSVIRTKNGAYVGTGER

SEQ ID NO: 106298 - protein, 126 aa, Unknown
  Obtained from environmental sample
  DOMAIN (6)...(126): Phosphorylase family
  misc_feature (1)..(126): Xaa is any amino acid
MEEAQMTGIIGAMEDEVSLLLGAMGTPQKTKIGEFEFHEGKLEGKDVVLLRCGIGKVSAAVGCALLIHTFKPDFVINTGSAGGIDPSLHFGDVIISTGLVYHDVDVTAFNYAPGQLPGQPQIFPRM

SEQ ID NO: 106299 - protein, 78 aa, Unknown
  Obtained from environmental sample
  DOMAIN (3)...(75): Protein of unknown function (DUF497)
  misc_feature (1)..(78): Xaa is any amino acid
MRKHGVSLALAKDLVWNEAMACPDKRFEYDEWRMIALAPIKDRLYYVAYVDRGEKIRIISIRKASNAEKKHYARIYND

SEQ ID NO: 106300 - protein, 54 aa, Unknown
  Obtained from environmental sample
  misc_feature (1)..(54): Xaa is any amino acid
MNVLTENVHILRDAGGRPTFALIPFDQYQALIGKQNKQPGIPVEVVDKALANEW

SEQ ID NO: 106301 - protein, 251 aa, Unknown
  Obtained from environmental sample
  misc_feature (1)..(251): Xaa is any amino acid
MSNSILKKQSIKELKELYDNGENVEQYLRNKYGIDSLTPEITELSYDIQAGSSVSLMQNNAEQKKIREEMGTEVSRRIFELLPNVNSILEAGMGEGTMLSSVLSGLKNTLAKNQPSIYGFDISWSRVAYAKNWLQEQNCANATVFTADMFQIPCAENSVDIVFTSFAIAYNVGREHLILSELFRTSKKYVLLLEPSFEWANDEQKQRMRKFKYVEGLYKIVESLGYKVVEHSAFPYYTNPLTPSALTIMRR

SEQ ID NO: 106302 - protein, 184 aa, Unknown
  Obtained from environmental sample
  misc_feature (1)..(184): Xaa is any amino acid
MGINLNKKIIKKNNAVYSDAADRFGTTSQAVFLGNPQTQYYRFEELCRFFDFYCGRKTILDIGCGNAELYKYLNFKGYRGIYKGIDINDKLIAQAKDRFPKIDVQKKDILSDKIKETKICDYVAISGLFNLNHGQNKKWVRDFLKKAYSYAKNVFSFNMISTYVNYKDAQMYYENPAEILAFCI

SEQ ID NO: 106303 - protein, 261 aa, Unknown
  Obtained from environmental sample
  misc_feature (1)..(261): Xaa is any amino acid
MEAPPFEQPSRDAAPPDDSGLDLSEGTSADDAADGEGAGDFDFNAFINSVPADTPPPPDEAAGEINFDDILGNTGDQAQESQSTDDFLNSLGGDNSSDGTSADGTGDETSATDDFLNSLGEETPSEETSVADDDDLLNSFGGDTPSADFTSADFQSNESFPADDFLNSQGGETSTGDLPDFPDTETPTPSDIKSEDDFSVPEDLLSGLGEEIESAPSDFPPEETQSTDFTSEEPFDETPSEVFTTDEFPTDGFPSEESDLT

SEQ ID NO: 106304 - protein, 294 aa, Unknown
  Obtained from environmental sample
  misc_feature (1)..(294): Xaa is any amino acid
SGTDYEEDSEEALEEPLEEIGQPESPIEEIPETPEIEETPIQEETQEPEEQEPGVEMVDESTPLPVEEPPPVEQPTITQPPIIQQPPVQQPIPVQPPPVQQQPPAQSQVPERTTPRLPPSPPPFLGPAEPEITPPSRQEPVAPAIPELPSLLRYEEPEEQIVFSRIVRLTVGQMLEIPFRGTGWVYLGELGNRRGLSYDSRRLDTQGGNTLGQSFIFRAEIAGTYILKFYRQDFIQDYIINDYVQVIVGEADDSRRGRPFSGIDRGRVIAEPRWPLVPEVAGSTSENVFPATAP

SEQ ID NO: 106305 - protein, 292 aa, Unknown
  Obtained from environmental sample
  misc_feature (1)..(292): Xaa is any amino acid
ARPKTQYFFNSNLNTDWLNPDQDGGTGISLGTILKVKGTGDERRAFVSLPHNISLSARDSVRIHRSGDSGRVTHKLTFAKEEKDGWWISAPEGSKGDYVYLIQIKEKQKHYAPVIAHNSGSKGPGREKAPSPHILTASEEKRKKHGDPFPEGLYVSVSRPEDLYIVQSSRPQRVMLALSQKNAKYLLAEDKPPLPFKPAEIILTLSPWFPQKTAEYESGLTTLVIGELIEMGYTQYMLNNMGHFSIFKGYEKVKLIAGPWLYMFNSWSLSFISSVGNGVDGFVSPLKTTGKT

SEQ ID NO: 106306 - protein, 262 aa, Unknown
  Obtained from environmental sample
  DOMAIN (25)...(259): DNA polymerase III, delta subunit
  misc_feature (1)..(262): Xaa is any amino acid
SAPKQDDKVPDGKPPVKKLSKAPVYLLLGPEKVMKRERVTAILKQHGIADDPENPARSQYFASDSPSEEIMSEITSYPFFGGAKAVIVHEAERLPRPALESYLSSPLETTVLILLSDKTKGKFSAPLERLCDKVGTIEVFWELFENQLSSWAENKARREYGLAMPPGLGALLTEICGRNMALVEQSLQILSNYFLDKSFALEDVSPILGEQRGSDIFALVAHCFQGQTVPAITMLRSILSEGESPIFVQSMLMRQAELLWRY

SEQ ID NO: 106307 - protein, 153 aa, Unknown
  Obtained from environmental sample
  DOMAIN (2)...(114): Response regulator receiver domain
  misc_feature (1)..(153): Xaa is any amino acid
MPNILVVDDEHSIREAILDVLQDEGFDAAQAASGEEALDILAKRRVDIMLLDIWLPGISGVEVLTRAHELFPSVTVIMISGHGTVDLAVEAMKLGAFDFIEKPLSIDRLLLILNNACRMRELEEENRRYKTGTPKDFVLIGSSAAMTKIRELI

SEQ ID NO: 106308 - protein, 74 aa, Unknown
  Obtained from environmental sample
  DOMAIN (2)...(73): SirA-like protein
  misc_feature (1)..(74): Xaa is any amino acid
MSKITLDVRGLSCPEPLIAFTDAVKRADLAEVELLFDCAAARDNIARAAASMRWQVASITEAPDHTIMNLVKHS

SEQ ID NO: 106309 - protein, 273 aa, Unknown
  Obtained from environmental sample
  DOMAIN (180)...(273): Magnesium chelatase, subunit ChlI
  misc_feature (1)..(273): Xaa is any amino acid
DAFEVTIEADVYEMMPGFTIVGLPDGAVRESRERVLSAIKNCGYEFPARKLTINMAPADVRKEGSAFDLPIAVGTLIASSQISADSAADYIMVGELSLDGTVKRVKGMLSMAVTAREMGVKGMIVPKDNACEAGVAEGVDVYPVETLSEAIDLLAGRKSIAPHKTDLNEMFNRSRVYSVDFRDVKGQEHIKRALLVAAAGGHNILMVGPPGSGKTMLARRLPTILPDLSLSEALETTKIHSVAGMLEPSTPLLAVRPYRAPHHTISDAGLIGG

SEQ ID NO: 106310 - protein, 79 aa, Unknown
  Obtained from environmental sample
  misc_feature (1)..(79): Xaa is any amino acid
MRLLSAAGISYAVKEYPVDESDLSAVHAAESLGMPPEQVFKTLVLQGASGSYAVCCIPAACELDLKKTALAAKEKSIDL

SEQ ID NO: 106311 - protein, 114 aa, Unknown
  Obtained from environmental sample
  misc_feature (1)..(114): Xaa is any amino acid
ISKAKVRELNSAKQAAAPMPSGKVSRLAEYIAEDNACSACYASLVFALSRIGLNSARGWTGRLKEKFCIGQGYKGKQGTLGVGQCTSSFKLSCPGCPPSGADVLAFLRGALGRV

SEQ ID NO: 106312 - protein, 161 aa, Unknown
  Obtained from environmental sample
  misc_feature (1)..(161): Xaa is any amino acid
MFAIFKRELRAYFLTPIGYIYMGLFLLLTGIFFTFNNIFSQSSQFTGFLGSILFIYLFAIPLLTMRLFSEEKRQKTDQLLLTSPVSVTGIVCGKFLAALAVYCATLAFTALYTVVIAIYGDLQTWETLGSYIGFIFLGASYISIGIFISTVTENQFTAALV

SEQ ID NO: 106313 - protein, 128 aa, Unknown
  Obtained from environmental sample
  DOMAIN (4)...(124): PIN domain
  misc_feature (1)..(128): Xaa is any amino acid
VSDYLLDTHTAIWFLNGERILSQTVRQIIVDPSNRRCISIASVWELAIKIGIGKMKFPGNSAGLVRVARANGFFIIPIKEDYPTVLENLPLIHRDPFDRILIATAIAEQMTIITADADIVRYDVPHVW

SEQ ID NO: 106314 - protein, 283 aa, Unknown
  Obtained from environmental sample
  DOMAIN (234)...(267): Tetratricopeptide repeat
  misc_feature (1)..(283): Xaa is any amino acid
AVCRKTVTVSTAICVLIVAGFWAYSYFTTEKDKEAATPLAGANADTFSPEVTAFDLEAHEIAAQRHMQSGRPGEALPHLRRIAAAAKDKDGPAALNALYNMVKAEVEIGDFSDAIGTADRLIPKISDSLLPSLQVRRAIALYNVKRYEESSSALKEVLDRNPKNAEALCFMGEMEAAAQTRSPTAERFFRRALEADSNYLETKYQFARYFENNGDLLNAKMLLQQVLVKDPLNVRAYARLGMIYYYEQEAEMALRAYQTALALNPSDYNTLYNLGELYRTLLN

SEQ ID NO: 106315 - protein, 137 aa, Unknown
  Obtained from environmental sample
  misc_feature (1)..(137): Xaa is any amino acid
CKVLGLSVLQLEDGEVPIGVPYLSDTLRWEITGDVWRTQDGKNIQLVMIKPLETGLSTNMVLVTTRRIYQIMLTSTRDSYMPMVKFRYPMQLQQMKFNTVQTFEEERSRKEKEDEGYYLSYNYKITSGWWLTGWFRP

SEQ ID NO: 106316 - protein, 236 aa, Unknown
  Obtained from environmental sample
  DOMAIN (70)...(161): Methyltransferase domain
  misc_feature (1)..(236): Xaa is any amino acid
MDTTCPPQVTYEREYFFDSYKKQYGKTYLEDFPNLIAMAKRRLKIISKLFTQKKAEPQTDDARDKVKTLLDIGCAYGPFLSAAKEKGYSPLGLDPAQDAVRYVQKTLGLPAVQGFFPNCPLPSPSIYDVVTLWYVIEHFRDCATILSEIKKLLNPGGILAFSTPSSSGVSGRKSLRNFLEKSPADHFTIWSPKMCRKALALAGFQVEKTGDNRPPPRTVPASGKVGKKQKKSLVWL

SEQ ID NO: 106317 - protein, 254 aa, Unknown
  Obtained from environmental sample
  DOMAIN (174)...(253): PPIC-type PPIASE domain
  misc_feature (1)..(254): Xaa is any amino acid
VPISWVAGNKLSQYYEQLLRRYRDQIDLNNFQIQMSLWSQAFESAAVSIAVLQEVKRSNYEPPEKVVDREVAKLPQFQDEKGNFSIYLYRQMSESSRLTLWRQVREELAAIQFYNDIFTLLIPAGEKEFFAKMGADMRAFEMVYFPVDDFPDSEYLSYARENPDLFKSIHLSKITVKSGERAAKKILESIKDGTTTFEDAARSQSQDNYADRGGDMGVQYVYDLEKEITDETIRENIFSLGKGELSSVVNLDEQ

SEQ ID NO: 106318 - protein, 273 aa, Unknown
  Obtained from environmental sample
  DOMAIN (1)...(273): N-6 DNA Methylase
  misc_feature (1)..(273): Xaa is any amino acid
VYEYFLQVFAIDAGQGEKGEFYTPAGIVQLIAELIEPYDGIVYDPCCGSGGMFVQSIKFVERHNGNRLKISVVGQESNPDTWRLAKMNLAIRGIAHNLGDRAVSTFTDDRHKDIKVQYIMANPPFNLKNWRGADELTNDYRFHGYDTPPVSNANYAWILHMVSKLDVSNGKAGFLLANGALNADGVEGAIRKKLIENDKIEAIIVLPREMFYSTDISVTLWIINNNKKAQTFNERQMRDRQGKVLFMDLRRWDENIYDKKYVQFTDEQIAQVK

SEQ ID NO: 106319 - protein, 279 aa, Unknown
  Obtained from environmental sample
  misc_feature (1)..(279): Xaa is any amino acid
IVRVSDKAVVYRGTAGESVSDSASQDTVRIADFSGFTAAGEYIVCSGALRSFPFTIGDNPYAGLRAAVLEMFHYQKCGVDLECGLWSHPACHITPAVIYGTDKKKDVSGGWHDAGDYGRYIVPAAKTIADLLWAYKLAVNPDPEIPDTVWFEIEWMLKMQDEESGGVYHKVSCEKFDALDEMPQDEKGELFLSPISATATADFAASMALASRFYPEYKEKLLSAARQAWNWCLAHPDAEGFTNPPGISTGAYGDDDSKDERFWAACALFAATGDETYHD

SEQ ID NO: 106320 - protein, 272 aa, Unknown
  Obtained from environmental sample
  misc_feature (1)..(272): Xaa is any amino acid
KAICGMRRGEVSILPGYDGEYGVIRTFAPGEAKESGIGLFEDNTVSNTNTKKKPLQAKQKTTAPVNSNKPLPQERIFSLDADQLAAVSSSLRKGIIIAGPGTGKTAVLAAKIARVIGEGANSASILALSFTVKAAAELRDRVLHLTQKPKVEKPETEKPVIVTFHSLCASILREQYAETGLSCDFKILSETERDDLLAKICATANNKALSPGRLGEYIEERKRYLLLPGENPKDLSRALPDSLVSFISEDNSGDDTMAGAYAEYRKQLNIMG

SEQ ID NO: 106321 - protein, 163 aa, Unknown
  Obtained from environmental sample
  misc_feature (1)..(163): Xaa is any amino acid
MDDFLLAGVEPADTLKNELSVTFSSPTSLSANNNGHNDYFLFNDIRNGHTTVHSWDMLPTSKRQKDICLLVLKNRRKKCYGPLDGNPLSLAHLQSLDGSIVQEELDELVKLGILKRERYSFAVLPRVAKCVLNDAEKLVLSKQENAVIVPDHLFCDRDIKKHR

SEQ ID NO: 106322 - protein, 265 aa, Unknown
  Obtained from environmental sample
  DOMAIN (138)...(265): ATP synthase alpha/beta family, nucleotide-binding domain
  misc_feature (1)..(265): Xaa is any amino acid
MSNENIQGRVIAIVGPAVDVEFEGNYLPEIYNALVTDIVDASGKTISVTLEVQQHLGEGRVRCVSMQPTDGMVRGQAVKDSCGPIKVPVGPATLGRIMNVVGHPVDEMGPIKTDKYLPIHREAPSYEELSTGKEVLETGIKVIDLLQPFMKGGKIGLFGGAGVGKTVLIMELINNIAKARGGFSVFAGVGERTREGNDLWYEMMDSGVINKKNLTESKVALIYGQMTEPPGARARVGLTGLTVSEYFRDEEGRDVLLFIDNIFRF

SEQ ID NO: 106323 - protein, 69 aa, Unknown
  Obtained from environmental sample
  misc_feature (1)..(69): Xaa is any amino acid
FCGSKAWSSFGMENLQYSIDNKKQNKIIKTAKYFLLENRKYSNMAIRFDVIFVKNNALVHLASAFTESV

SEQ ID NO: 106324 - protein, 278 aa, Unknown
  Obtained from environmental sample
  DOMAIN (11)...(221): SecA Wing and Scaffold domain
  misc_feature (1)..(278): Xaa is any amino acid
MSRIGMEGGDPIYHPWLNKSIENAQKKVEERNFEIRKHLLDYDDVLNQQRKFIYEQRDAILLDNELKTRVNDATAGLVGELIEEFNREQRQDTAGALKNLNEQLRTKFGYHLLQKQGDPKNFERLEKEIIADLEKDINDKEALIGPDYLNMIIRDCYLHAIDNKWLDHLENMEALREAVYLRHYAQKNPLTEYKVEGFQIFDSMVDDIRREIASRLHLVRINVAPAGDARRSSRTITSQSASHSSMASFGAGAQGGKGSPMGAGAPYSGASRPDGATV

SEQ ID NO: 106325 - protein, 275 aa, Unknown
  Obtained from environmental sample
  DOMAIN (1)...(90): ParB-like nuclease domain
  misc_feature (1)..(275): Xaa is any amino acid
ILCACQQLISSTDRKYGGVGNIETLAQSISEIGVIHPPAVKEAKDKKGYYKVIAGRRRFEAVKSLGWKNLDVKLYADDANEESIALAENVNRDDMHPLDEAETFRRKLDQGMDVEEIAMYYSRSISGIHQRIRLTNLIDGVKEMFRDGNINLSGAALIASLPEEDQEKFVKKFKGKSVDKWEIGNFMRSVQKMVIKHIVDEQCQRCKTRTYNTTPGLFDDYVSVDDVCFNSECYAQKWHAYIGRLISEQAGETDNNIILNRGLPQFLSKKDKTMT

SEQ ID NO: 106326 - protein, 276 aa, Unknown
  Obtained from environmental sample
  DOMAIN (1)...(276): Aldehyde oxidase and xanthine dehydrogenase, molybdopterin binding domain
  misc_feature (1)..(276): Xaa is any amino acid
ENTYVTGIQEHWYAEPCGAVSWPEQQGRIIVRTATQWPFHVSRSVCGVLGIPASKVLVEPTISGLHMDGKLWYSSLVSCQAALGAWITKQPVRLILTRDEDFSFSPKRFGTEISLSCAFSEKGEISGLDIKAVVNVGAHAVNTDEILEFVNLGSAGVYKIKNIRFSGSAIKTNIPPQGPFAGLGLAQGLFALESHISYIADSLGQDPAQWRKQNFHALGQGVLSNKGAKGPANKGSSFGNQLIDNVIKISDYRRKWAAYEMLKSVRKKNSEAASLH

SEQ ID NO: 106327 - protein, 244 aa, Unknown
  Obtained from environmental sample
  DOMAIN (17)...(233): Sigma-54 interaction domain
  misc_feature (1)..(244): Xaa is any amino acid
EENTSLKRASGVASEDIIGTSALIRDIRETVKQAAESDARILITGENGAGKEVIARAIHQCSARAGNPFVDVNCAAIPETLIESELFGHEKGAFTDAVSTRKGRFEMAHGGTLFLDEIGDMSLPAQAKVLRVIQEQKIERLGGEKTIETDVRIIAATNQDLEKACETGRFRQDLFFRLNVIPIHVPPLRERPEDISMLLCHFLNLLNTEITLEADAMELLASHDWPGNVRELKNLAERIAVMHR

SEQ ID NO: 106328 - protein, 201 aa, Unknown
  Obtained from environmental sample
  DOMAIN (10)...(116): Uncharacterised protein family (UPF0153)
  misc_feature (1)..(201): Xaa is any amino acid
VREAYPNEIACRKGCGICCELQSVNQIEAYAIRSYIANNKNLLDDARVDDDVNDDVVVDANDMSDDTDTDNNTDACPFLRQQSCSIYPARPIICRTHGLILRSSEFPLSRQAASCPYNFPSVHPNDFPPELAVDVDAITKNLVNLNLAFCMASGVDVRDEAGGGESRVLLRDLAGILSRLWCGKRSKCSTGQGRRVGGLPL

SEQ ID NO: 106329 - protein, 210 aa, Unknown
  Obtained from environmental sample
  DOMAIN (22)...(198): Sir2 family
  misc_feature (1)..(210): Xaa is any amino acid
MADYIELFEKIKSAKHCTALTGAGVSTLSGIRDFRGKNGLYNDVDAEKIFDINYFEEDPSFYYIASRELIYNIDEKSPSIVHNVLAELERKGFLKALITQNIDLLHTKAGSSKVIEIHGSPKTHYCLRCAGMRMSFDEAAAIVRSGELPKCPKCGRVLKPAITFFGESLPIEALREATEEAQKSDLMLVLGTSLTVYPAASMPQYTCPGR

SEQ ID NO: 106330 - protein, 284 aa, Unknown
  Obtained from environmental sample
  misc_feature (1)..(284): Xaa is any amino acid
DGKQIISGFLDCTVRIWDTATGKEIACFASFSGTDSQLASASRGLKMEIQTAATSNEGEWISITPDGYYNASPRGDRYLNVRIKNTVSGIDSYRSVFYNPDVVQARLQGRRDPASKASFTIQDAAKLIPPEVAIQSPANGSATNTATANLSVAIASQDQPIKNIKIIVNGRLIGKDELSAVKGTGLQPERASLTVTGNQKTVNLTLPLELEPGNNRVEVVAFNGYSESRRFIDVTRNAPAGERPPLPNLWILAVGVNGYDNAGAKLQGLTNLNFAVADARGLVD

SEQ ID NO: 106331 - protein, 292 aa, Unknown
  Obtained from environmental sample
  DOMAIN (71)...(274): DnaB-like helicase C terminal domain
  misc_feature (1)..(292): Xaa is any amino acid
KKRKHRELIHLGARLARQAAEEEAQPEALVEEAGQELYRIAQGQDRRGLQHIADIFHETYQELLDRLEGRGSSGQCVGFGRLDDLTQGFQPGNLIILAARPSVGKTSLALNWLWLASRKYGAHSAFFSLEMSREEVRDRLISAHAQLDLKTVARGQMTDAIHSQWIGARDELAQLPIYICDKAAITVREIAALIDKHGTQGSPKLDLVIIDYLQLISSPQDSRAARQTEAVRIGEISRSLKIMAKERNIPVIVLSQLNREIEHRQTGRPQLSDLRDSGAIEQDADMVMSSTK

SEQ ID NO: 106332 - protein, 157 aa, Unknown
  Obtained from environmental sample
  misc_feature (1)..(157): Xaa is any amino acid
MNRRKMVCLQALLLLIFAAWLTPGAAWAAPFSAGSGTQLDPYIVTTAAQLDAVRYYLSSHFKLSNDIDLTSYLDPGGAGFTEWDTAGWLPIGYIGYEEDYGSNFLGSFDGDGHKITGLWIDRSDTSRVGLFGVMEGGTIQNLGVEISDNVVRGRDSV

SEQ ID NO: 106333 - protein, 285 aa, Unknown
  Obtained from environmental sample
  misc_feature (1)..(285): Xaa is any amino acid
ALLRGSKNAGLPKPKPDCTLITRRPELPKLSELPNDENDALLEAFDTYIVKDNVVDGEGSISESGDLGTRKQDIHAKVYLLTKGQESELYIGSANATKRAFDGNDGNVECLLKLCGPKKSLNVKSLKSDLGLDKPNDKNCPFERVEPGEYADQEPESDLARKLDDAIKEFCAARKEAKITAKNEHFAATVNITLEDMMKLGAVSLTLSPLMKSEPQPVAESVTFAGLALGDLSEWYEVAAEAEDEKRSRVVKIETEGIPNNRDSEVFSHIIENKESLLEYIAFLV

SEQ ID NO: 106334 - protein, 282 aa, Unknown
  Obtained from environmental sample
  DOMAIN (1)...(156): Glycosyl hydrolases family 2, sugar binding domain
  misc_feature (1)..(282): Xaa is any amino acid
MKLSLNEEWKLLYRDLAASAHASANQVLDVLEAKDYIDAGNLPCDAHVPLIKAGIIKDPVVADYSYACEWMERKSWWYRKDFEVTEEDLQCRSIRLVIESLDLFADIFINGRLAGSHQSCHFPFTADIARYLKAGVNSLLIRLTMGPEGITKGDYDYLAEYICTEADGGRGDRGEKARAFLRKPQYVYGWDWGPRIGTVGIMKNAWIDFLGDFAVTRLCPVTLEAGKDAKIRVEAEFESLLPISTQEAYLGLDIQFEGKTVYTESRNILALSGANYVDFELT

SEQ ID NO: 106335 - protein, 271 aa, Unknown
  Obtained from environmental sample
  misc_feature (1)..(271): Xaa is any amino acid
WRSSPYGGKGPNDNEVGDRHHWGDCTMNPNMENRITPEAYDKVTSRFITEYGYIGPCSEATIKKYYGDNPVVHNDKIWNLHNNTFEKATVPEGIRKHYIDPEKLELKDYLRYARLVQGLMYSYSLEAIRFYPKNDGSLFWMYNDTWGEVGWTIIDYYLDRKPSYYYVKRAFAPVKIILRPSPDKEKVLVMGCNDTASDKKIDLEFGYVSFAGNYETSKKTVTFPAFSKGIVLEFGMPKGDIKKGPCICTGGGHPSGDFAYRDIQGIFSVGK

SEQ ID NO: 106336 - protein, 258 aa, Unknown
  Obtained from environmental sample
  misc_feature (1)..(258): Xaa is any amino acid
VRGRKNNLRKKASWFPQGYRELTGDLNTAKANGFDPFIIERLNSLVLEGSQILYASRSLSLKAAADFVLRIFPRAVRSQWRSLAAAMLLFYGLAFFFGVLCVRNPPMVFLLLGEDTIQGLEEMYDPASLHYLEPRDVSSDADMFGFYIYNNISIAFRTFAGGILGGIGSIVLLCFNGAFLGAAAAHIINTGFGKTFFSFIIGHGSFELTAVCLSAQAGLLMGYRFFVTGGLSRSASVKLAGKTALPIIAGAACMLVVA

SEQ ID NO: 106337 - protein, 286 aa, Unknown
  Obtained from environmental sample
  misc_feature (1)..(286): Xaa is any amino acid
TVTVTAKTGKTSGAITVKYNGNAAAPSAAGAYTVTFDVAAVTGWNEANGLSAGTLTINYIVIADLNDLSGYLSSKPTNTKDTPYYIALNIDDEDDFAPLLTTLNSATDKYVYLDLSGSTITEIPDSAFLIWNFPLKGCAALTGITIPNTVTSIGSAAFAWCANLVSVTMPDTVTSIGNSAFNYCISLSSITIPDSVTIIYDWAFGQCTNLASVIIPDSVTSIGVGAFAYCTSLTAINVNAGNSVYTSQDGILYNKNKTSLHTYPAGNTNVSFAIPNGVTSIGWYAF

SEQ ID NO: 106338 - protein, 190 aa, Unknown
  Obtained from environmental sample
  DOMAIN (57)...(190): CheR methyltransferase, SAM binding domain
  misc_feature (1)..(190): Xaa is any amino acid
MTDKLSREAEERFGIKADPDDIEKLRAYLWDTYGSENQEIVNKVFSSGEAAGFLTVNETYFFREPAHFSFLWDILPSFKKTGIRICCAAVAVGCEAYSAAMMIEAYNRGAAPTGAYAPTGAPPLSYHIDAFDINTRVIETACRGVYGGRALREDGSCFRYMADPYLEKTGNEYQVAQSLKKNISFFVHNL

SEQ ID NO: 106339 - protein, 94 aa, Unknown
  Obtained from environmental sample
  DOMAIN (6)...(94): Protein of unknown function (DUF1018)
  misc_feature (1)..(94): Xaa is any amino acid
VASENRRKKLIQLIHVGKGKMGMDEQAYRAFLTGVCGRDSAAKMTIRQLEKALKAMRENGFEGTPNRVKPMEKGGASWDQLEYITGMWAVCARK

SEQ ID NO: 106340 - protein, 89 aa, Unknown
  Obtained from environmental sample
  misc_feature (1)..(89): Xaa is any amino acid
MAHQPGGASENAKAGVALQLSGHTHGGQIIGLKMIVKAANDGYVSGLYDVDGMKLYVCNGAGLWTGLPVRLGAPSEIAHIVLRVPKIAE

SEQ ID NO: 106341 - protein, 256 aa, Unknown
  Obtained from environmental sample
  misc_feature (1)..(256): Xaa is any amino acid
FRDFREFAVGVVSGDNYVGGLVGYAFGGSINMCFSTGMVIGTGKRSVVGGLVGYDFGNSNANWNSAGKATVGSEAGKLVKEAKITDCYWNINTSGISVSAGGEGTGTSTMANDSIFKGWDFDSTWVISDNTYYPVFKEVPVFAITYRADYNGKLEVKGAKDRVDVCVMALGDGSPGLEVRAVPNANYSFLRWSDGNTDPVRRDVATADKIFIAEFEIASGNTKTITYGALRNGKVKINGPNSTIESNVYTMKVITG

SEQ ID NO: 106342 - protein, 252 aa, Unknown
  Obtained from environmental sample
  misc_feature (1)..(252): Xaa is any amino acid
DGNVSGNHGGTDIWVAKLNAAGGIAWQKCLGGSWDDGAQSIQQTNDGGYIVAGWTESNDGDVSGNHGGGDAWIVKLNAAGGIAWQKCLGGSSNDSASSIQQTSDGGYIVFAHTRSTNGDVSGNHGDYDAWVAKLNASGEIAWQKCLGGSREEYANSSISQTSDGGYILAVRTNSNDGDVSGFHGGNYYDAWVVKLKPGAAGTAPTITTDILPNGAVGTAYNQTLAATGTTPITWDLAGGALPAGFSLSPAGV

SEQ ID NO: 106343 - protein, 235 aa, Unknown
  Obtained from environmental sample
  misc_feature (1)..(235): Xaa is any amino acid
MTTPNSIQETSDGGYILAGGTSSNDGNVSGNHGGEDAWVVKLNASGEIAWQKCLGGFSSDLAYSVQQTSDEGYIVAGKTSSNGGDVSGNHGGEDVWVVKLTGTGEAAPTITTATLPNGTVGTAYNQTLAATGTTPITWDLYGGTLPAGFSLSPAGVISGTPTTGSTANFTVRATNNLGSDTKQLSIIVDTATGGTAPTITTATLPNGTVGAAYNQTLAATGTTPITWDIYDGALP

SEQ ID NO: 106344 - protein, 211 aa, Unknown
  Obtained from environmental sample
  DOMAIN (1)...(98): Methyltransferase domain
  misc_feature (1)..(211): Xaa is any amino acid
GTGRVSFYVAEKTGRIFECIELSEQMLERFRDKLKKSGKQQLQENIHIHKGDMSTFNLDQKFEYIIIPWRALQWLPIKEKTIECLNCVYRHLTDNGIFIFDIFKPRTYDEKWLGKEDISYDIIDGDKRIIRSTINHHADTEKKYIQYKNKIRILENGAERVKEDLLTIKYYEYNDIVTVLKELKFKIKEEYGYYDKRAIKDGEEMIFVCTK

SEQ ID NO: 106345 - protein, 237 aa, Unknown
  Obtained from environmental sample
  misc_feature (1)..(237): Xaa is any amino acid
MLYAIFHLGGAANNMGWESAQRIAARDDVAWAVPVSLGDSHKGFPVVATTRDFFRRYRYQRDKELRFVQGSPFAGLFDVVLGAEAARKSGYVLGEKLTLSHGAGASGHSEHTDKPFAVTGILAPTGTPVDASLYISLEAMEAIHIDWKGGAPVPGFRITAEQATKFDLAPKSVTALLVGLKSRARVFAVQRDVNNDPREALTGVMPGVALDQLWEMLHTGETALLLISWLVTATGLA

SEQ ID NO: 106346 - protein, 296 aa, Unknown
  Obtained from environmental sample
  DOMAIN (22)...(45): 4Fe-4S binding domain
  misc_feature (1)..(296): Xaa is any amino acid
LLLRLYSACPVKYCIDGSGEKLTINPNLCIGCGNCITSCSHGARKLIDDTPRFFEDLKHREKIIAIVAPAAASFFTDRFLNLNGYLKSIGVEAVFDVGFGAELTVLSYVNYIKEANPKLLIAQPCPAIVSFIEIYHPELLPYLSPADSPMLHSLKMIREYYPQYKGYKTAAISPCIAKRREFDETKYGDYNITMLSLKTYFEEKHIDLNSYPAQEYTGALAERAVQFCNPGGLLDTAERFIPGIRRHTFRVEGVHTIYPYLSEISKLVNKRDIELPRMVDCLNCEKGCNGGPGTGN

SEQ ID NO: 106347 - protein, 84 aa, Unknown
  Obtained from environmental sample
  misc_feature (1)..(84): Xaa is any amino acid
MHKAILMAAGRGTRISRTIGGSCKCTLDVDGIPLIRHTATMLLRHGIETHVVVGYQKELVFKALDGLPVIFHENIFHSVTNSIA

SEQ ID NO: 106348 - protein, 271 aa, Unknown
  Obtained from environmental sample
  DOMAIN (39)...(185): GAF domain
  misc_feature (1)..(271): Xaa is any amino acid
MSKETDETERLIATLRRRERMTDALNRVAIMFLSHSEDTFEATMTAGVREIADVFNIDRFSLWRNEFIGTEGLSGGQIFRWDRLSGGTTQPTKGLQAMSYANHVPTWEKILANGGIINSPVRLLPEPEATVLRSFGVVSAFVSPISVNNLFWGFALLEDRHNERFFDEDCVDLMRSAAFLCANTVMRIEMERTLANTNALLKVALRKATEASKAKGEFLSNMSHEMRTPLNAITGMTAIGKKAKEPETQDYAFQQIQDASTHLLGVINDVL

SEQ ID NO: 106349 - protein, 158 aa, Unknown
  Obtained from environmental sample
  DOMAIN (1)...(154): TatD related DNase
  misc_feature (1)..(158): Xaa is any amino acid
PEFGDKKSQIELFITQLDLAGKLGLPVIIHNRDAGKDVLDILRDRLPPRGGVLHCYSENAEYAKKALDLNLYFSFAGNLTYRNAKNLHETVEVLPLDRILIESESPFMVPADHRGKRNMPKYLPLTSRFLAEMLEMDEEELSAALWDNANRFFGLPNE

SEQ ID NO: 106350 - protein, 271 aa, Unknown
  Obtained from environmental sample
  DOMAIN (84)...(197): Response regulator receiver domain
  misc_feature (1)..(271): Xaa is any amino acid
VNRSVEGTGLGMNITWRLVRMMNGMISVESQPGKGTKFTVRLPQQRASSNVLGKELTEKLRNFRISSSAQMKRAKITREYMPYGKVLIVDDVYSNLYVAKGLMSPYGLSIDTATSGAEAIGKVKAGELYDIIFMDHMMPKMDGVEATKIIRDLGYKNPIVVLTANAITGQAKYFLENGFDEFISKPIDIRQLNTILNNLIRNKQTPEVIAEANRQKNDLDSEQRSSLSKPDSVLQTVFLLDVKQSLPILEETLERIDVASEGDLRFVTINV

SEQ ID NO: 106351 - protein, 275 aa, Unknown
  Obtained from environmental sample
  DOMAIN (1)...(263): Periplasmic binding proteins and sugar binding domain of the LacI family
  misc_feature (1)..(275): Xaa is any amino acid
HEDYNPFFALIEQTIREEVEKNGDKLISVDPDMDSQKQNSQIEELIARKIDAIFINPVDWEAIKPALVSLNKARIPIINYDAEVKDMDLVTAYVGSDNRNAGYICGLDLVKRFPNGGPIAVFDSPSMRSLRDRIDGFKEAIEGKGFTIVFLEDALGNSVDGRRHTETMLKSNIKVIAVMGGNDPTALGILEACQAANRTDILIYGVDGSPLAKAEIAKRGQFAGTGAQSPINIAKTSVELAYKILNKQPYEKKVPVATFMINQENIDNYDIHGWQ

SEQ ID NO: 106352 - protein, 60 aa, Unknown
  Obtained from environmental sample
  misc_feature (1)..(60): Xaa is any amino acid
MLDSDPAFLYEVEAKRLNEAVKRNIKRFPVDFMFRLTKNEFSEVVANCDYLYKKVTDSYE

SEQ ID NO: 106353 - protein, 265 aa, Unknown
  Obtained from environmental sample
  misc_feature (1)..(265): Xaa is any amino acid
MEESVVDTGDVVSTEESVVDTGDVVGMEESVVDVGDVIGTEESVVDIGDVVSTEESVVDVGNVVSTEESVVDTCDVVSTEESVVDTGDVIGTDTIVDTDDVIGTDTIVDTGDVIGTDTIVDIGDVVSTDTIVDTDDVIGTDTIVDTGDIIDTDNIIGTDTVVSTDSVVDTSDVIGTETIVDAGDTAVDTVDTIDTIDIIETAVDEDNKIDSAADMLGTGDVVDMDDEIIAEIKAGRAAAAPEVIDTNIDDEIIAEIKPAGSPPLP

SEQ ID NO: 106354 - protein, 153 aa, Unknown
  Obtained from environmental sample
  misc_feature (1)..(153): Xaa is any amino acid
AYANTVQGKWKKITEGYGNMVLGYQGKTPREPDKEIVRIASEQMKKPVFTGNPLDVLEPGIPKAKKVLEENKLPTTDENIFIIGAMATKGGNKGLDFLQGKARVSVPKKKPASAAAPAASAPAPAAAAPSGGATAINYGVTVAGKTFNVQVSG

SEQ ID NO: 106355 - protein, 260 aa, Unknown
  Obtained from environmental sample
  misc_feature (1)..(260): Xaa is any amino acid
LPSQKITSIAWHEMRKELYVGVEGAGIARLIPKQNENEKDKWSVFSLQDGIMDLSPRAVSVDSSGHIWVVHKEGLSHFNLMRWEQIRFENNEVHGITVSEKGTIWIGTNKGVWSYLPEYATPSGRKSETELGKSETGNTQGKWNHYHTGNGLESNTVWRVLSLGNDVWLSTGAGVERYHAAQNQVAFFYERLLPILQLPDLYHLYTGVTFPLGDWGTWGVFLNFISFGETTVSDEINPDQVSSFNSSEVVLGLSYGTKLN

SEQ ID NO: 106356 - protein, 257 aa, Unknown
  Obtained from environmental sample
  misc_feature (1)..(257): Xaa is any amino acid
VQQDGRAPDYVPKAQRSEAVPFASSGAWEHLSDAQKLESKWIIAVENLVALRDVPEAMKTAAVCLAAVQQYGNALEFVPETLKTEALCLAAVQQNGTALQFVPEALKTETFYLTAVKQDGWALQYVPEALKTEVLCLVAVQNGRYDTALRFVPEAQKTESVCLAAVKKNGYALEYVPEAKKTGVLYLTAVQQAGGSLKFVPEAQKTEAICLAAVQQDGWALEYVPEAKKTEVLCFAAVQNGRYDTALRFVPEAQKTE

SEQ ID NO: 106357 - protein, 263 aa, Unknown
  Obtained from environmental sample
  misc_feature (1)..(263): Xaa is any amino acid
QDGSALQHVPEAIKTEALCLTAGYRELQYWPEALKTEALCLAAVQQYGSTLEHVPNALKTEAFYLAAVQTNGWALEYVPDAKKTEALCLAAVQQEGRALQYIPDTIKTEALCLTAVQNNDAFYVPDVLQCIPDALKTEAVCLVAVQKNYYALQYVPETLKTEAICLAAVQQDGQALQYVPNALKTEALCIEAMRHSSVHITLLYRGGMGMQTPPPPTHPLQLVPEELKTEAVCLAAMLSDQHAAIPSNFTALDFMPEALRPQV

SEQ ID NO: 106358 - protein, 146 aa, Unknown
  Obtained from environmental sample
  DOMAIN (6)...(146): Patatin-like phospholipase
  misc_feature (1)..(146): Xaa is any amino acid
MLDYGLVLEGGGLRGLYTSGVIDAFLEKGIEFPLVIGVSAGAGYGCSLVSRQHGRNLKILREFRKDPRYLSFGSYIKTGNYFGIDFIYDEIPKSIPFHTDVFLSSPTRFITVCSNVETGKPEYFEKDEHILQVLKASSSIPFLCKL

SEQ ID NO: 106359 - protein, 189 aa, Unknown
  Obtained from environmental sample
  DOMAIN (33)...(142): Type IV leader peptidase family
  misc_feature (1)..(189): Xaa is any amino acid
VEFFGLQLGFLAAIISEPNPWQNANMAVSLRLFWLMVTLIPIFAIDFKYLLLPDTVTIGGILLGFALSFFDGGIGWLGSLIGIATCGGGLFLFSFVISKIIKKEGMGFGDVKLFAGFGAIMGAELAFVALIIGSLLALALIVPFRFIAKKDMTKPIPFGPFLGLGAPISYLFGYNILDAYMGIVDKLLS

SEQ ID NO: 106360 - protein, 100 aa, Unknown
  Obtained from environmental sample
  misc_feature (1)..(100): Xaa is any amino acid
MILIFGGAYQGKLAYALERFNLTQNDVFLCGNDDVCLPENRKIIYEIDKWILALLKKDIDVEQAMRSFIESNKDAVVICNDISCGVVPVDPLLRKWREAA

SEQ ID NO: 106361 - protein, 230 aa, Unknown
  Obtained from environmental sample
  misc_feature (1)..(230): Xaa is any amino acid
MVRDLMASGFQMVKQEMQEAFIAEADKRAEEILLDLLLPGTGKKSKPKKTAPAPVVRPMGSFTFGPENGQGAGLIGTAIQVGIPSFMNQNAQEDKTEADEADKPEDPQSADGAGDLSMTREKFRAMLRDGKLEDRTVELMVNQNPQFPPFEMMGVSMEDVESSLSGFANFFGGGKKKKVVTIARAREIIKAEELEKLIDRDRVSDEARQRVEETGIIFIDEIDKIAVKGE

SEQ ID NO: 106362 - protein, 286 aa, Unknown
  Obtained from environmental sample
  misc_feature (1)..(286): Xaa is any amino acid
CTLVLGHHAPKLGIGTYLNNTKSKFADVITETDIRGLRFIPGDNEIPGTANLSPNQRKELVKELLNLQNDADILILDLGAGTHQSILDFFLLSNHGIVVSAPAVTAVLNAYVFLKNSIFRLMFTSCAKGSPARAELEGIRKDGAGHIYIPKLLPQIKKVDPASYEKFVRRLNALHPRLIMNMVDSPKDADVAMKIRRSCEEYLALKIEHMGVIYRDSLQDTALSSRLPIVLYKPQAVLSQAIYRIADKIMESPEDDFYLDDKQIEDSFQEAEIEAEVDFGSKMEYV

SEQ ID NO: 106363 - protein, 247 aa, Unknown
  Obtained from environmental sample
  DOMAIN (1)...(102): DnaB-like helicase N terminal domain
  misc_feature (1)..(247): Xaa is any amino acid
MTDNNIGPVLLGAVIANADSGEVLPDGIHKSFFESARDKTIFEAVTDLTRENKPPNLALLKDHLTRTGKLKDAGGVSYLSELTSLPGAYASLIPHYADTLIKQAREKEIHRAILEAAEMVKTAPALLDVNGLINKLAVKETESASFKLTRIGKIKIKPPEWAARHFLEKDSFCSIYGDSGAGKSFLAIELAACIATGTPFYGLPVKQGPVFYIAGEGNAGISRRLLAWSIMRGVSLETAQLYLSSGA

SEQ ID NO: 106364 - protein, 196 aa, Unknown
  Obtained from environmental sample
  misc_feature (1)..(196): Xaa is any amino acid
VAESNKRSVRLNGSRGLDTKAQEARAAYLFLIPALVGLSVITYGPLLAVFVLSFFNWRGARSPSFTGFANFISLFTEDPYFIDSIKVTLYFSVLAVIGSMIYSLAVAILLNRKVPARGFFRAVFYLPYILPAMAVYIGWSWLYESNFGLFNYLISAIGINKVAFIADPRLVVPSLSVIAVWQSGNLIVIFLAGLQN

SEQ ID NO: 106365 - protein, 99 aa, Unknown
  Obtained from environmental sample
  misc_feature (1)..(99): Xaa is any amino acid
MKAKLTLHKDFSIGETDKRLFGSFIEHLGRAVYSGIYEPGHPQSDKDGFRNDVAELVKELDVTIIRYPGGNFVSGYNWEDGVGPLEKRTGTAGSCLGYK

SEQ ID NO: 106366 - protein, 133 aa, Unknown
  Obtained from environmental sample
  DOMAIN (54)...(128): OB-fold nucleic acid binding domain
  misc_feature (1)..(133): Xaa is any amino acid
VNLSSIPGFGPVKIAALKANEIITLWDLLFYLPRKYEDLRKATKIRDIKDDSIVALVVHIAEVGMSKNGVALVVKIRDESASIEMAFFQAKSYWHKKLKVGTRWIVIGKRKIDERYGLQITRIDMRPIKENDE

SEQ ID NO: 106367 - protein, 55 aa, Unknown
  Obtained from environmental sample
  misc_feature (1)..(55): Xaa is any amino acid
MHTEAKTRLIIDKKLADSGWSLQDYKGEFNPAASLGVAVREFPTSSGPADYSGLS

SEQ ID NO: 106368 - protein, 278 aa, Unknown
  Obtained from environmental sample
  misc_feature (1)..(278): Xaa is any amino acid
RNSGFGNDSDNNGSGGNAMPLSVTVGGEVSASLLGYFDDFSKGADYTQLGDVFAGKLKFSAGTSFADGMIKLNFQTTPQPVSIDEAYVRAYFGGLEIEGGLRKLTWGKADSFGPLDVINPLDYSELTDFSDPMNLKIARPLIHASYRIGSFSKIEALFVPIFEPLRFATEGRWEPAQMKKLKNLPNQIQDQIQTEVQEKIKPILENLPPYIPYTPPSPTVTVMEHKPDDISTLAYAQAGARFTTTIGPADIGLQYYYGYLTRPAVSSTITSTTTLKPL

SEQ ID NO: 106369 - protein, 144 aa, Unknown
  Obtained from environmental sample
  misc_feature (1)..(144): Xaa is any amino acid
MDGNKTLTANFQLIPTTPQYTLTSSVNPSGGGTVSRSPDQTSYESGTSVIVTAKPNTGYEFIGWSGAMSGTTNPLTITMDGNKTLTANFQLIPITQYTLTASANPSEGGTVSRSPNQTSYESGTSVIVTATPNTGYKFTGWSSA

SEQ ID NO: 106370 - protein, 199 aa, Unknown
  Obtained from environmental sample
  misc_feature (1)..(199): Xaa is any amino acid
MNMKRNIVFPVVLAALATAMVLSCGKKQQLYIFNWTYYTPQSVIEKFEKEYKVTVLYDEFASNEDMYAKIKAGGAGYDIVFPSGDYVSIMIHQNMLEKIDKNKLQNLNNIDPAVLRKSTFDPNMEYSVPYYYGASGVMVNTAKVPTFEQSWSIFAREDLRNRMVMLDDMREVMGDALKFLGYSVNTKDPAQINEAKNLI

SEQ ID NO: 106371 - protein, 180 aa, Unknown
  Obtained from environmental sample
  misc_feature (1)..(180): Xaa is any amino acid
ALIAVKRNAEVYEHLPERLKTPKVSYTAVKNCGDMIRFVPERQRTPHLYFVAVRCFGLALEFVPDELKTELLCLEAVRGAGDALSHVPERLKTKKLCQTAIKQGGWALKHTPDRFKTPKMCLTAVESHGCALEWVPKKHKTKQLCCIAVRQDPRAFMFVPPTMKATIERMTGIKDRSKKA

SEQ ID NO: 106372 - protein, 279 aa, Unknown
  Obtained from environmental sample
  misc_feature (1)..(279): Xaa is any amino acid
AFQNGKRGVLLVVFKQPGANVIDTVDEIRALLPRLIRNIPPAMNVAILQDRTGTIRASVKDVEFTLGLTVMLVVLVILLFLRNFWATIIPGVTVPLALLGSAAAMYLMGFSLDNLSLMALTIAVGFVVDDAIVVVENIHRHIEHGETPFAAALKGSREIGFTVLSISLSLIAVFIPLLLMGGIIGRLFREFALTVTASIAVSAVVSLTLAPMMCSRFMRPEAHEHGRLYRVIESGFDALLAFYRSTLDVVLRHQGITLAAFFATMMVTGAMVCTPPRDL

SEQ ID NO: 106373 - protein, 48 aa, Unknown
  Obtained from environmental sample
  misc_feature (1)..(48): Xaa is any amino acid
MNISEPFIRRPIATALLMAAIGFVGLVAIPFLPVAALPQVDFPTIQVS

SEQ ID NO: 106374 - protein, 212 aa, Unknown
  Obtained from environmental sample
  DOMAIN (5)...(211): Domain of unknown function (DUF323)
  misc_feature (1)..(212): Xaa is any amino acid
MGSPPGEEGKDIGTDGDNEKMHGVHITKDFRMSKYLVTQGEYEKVTGIKPSYFTNDAESGEKQKNRPVENVTWYDAIVYCNKKSALDHRTAVYKVNGKGDTTEWGVFDPGDPWDVEADWDANGYRLPTEAEWEFACRAGTTTAYNTGKKNNNTGWYGDSKDETGNSGGKTHEVGKKSENKWGLYDMHGNVLEWCWDWYKGDYGDDKKVSTNP

SEQ ID NO: 106375 - protein, 273 aa, Unknown
  Obtained from environmental sample
  DOMAIN (102)...(191): Elongation factor G C-terminus
  misc_feature (1)..(273): Xaa is any amino acid
ASIYPMKSEDYVSLKTAMEKLKLNDASLIYEPDSSQALGFGFRCGFLGLLHLEVVQERLEREFDQDIIITSPTVEYEVYLTNGTKQIVDNPVKYPEPQYVEHAAEPFVKAVIITPAEYMGAIIPLCLEKRGTQRGMEYLDERRIQLSFDLPLAEIVYDFYDRLKSVSRGYASFDYEITSYEAVDLVRVDILVNGKQVDALSQLVVRSGAQLRGRQIVERLKNLIPRHQFKIPLQAAIGGSIIARETIGSMGKNVTAKCYGGDITRKRKLLEKQ

SEQ ID NO: 106376 - protein, 261 aa, Unknown
  Obtained from environmental sample
  DOMAIN (75)...(230): Peptidase family S49
  misc_feature (1)..(261): Xaa is any amino acid
MARPLFAQNIFLELNLNNQRAQNITRSMRPKPALELFRVIEQAGNDRKIAGIVLNISACQLGQETLWELRNALEKFKAKGKKVCAFISNANLDLYCLATVADKIVMDDQGVLTLLGYAWGRGYVKHSLEKLGIGARELRYLEFKSAAESYTRDSMSDADRKQYGEILDDIMGITRDTVTKARSWTGEEFDSIVNNEFMFSARRALERGLVDRSGRKGAVIEAVREISGGNEAGYFFLYGDAESSLTGSKFPYKTARQGGLF

SEQ ID NO: 106377 - protein, 290 aa, Unknown
  Obtained from environmental sample
  misc_feature (1)..(290): Xaa is any amino acid
DSKVWQTKKHRLEFIDEEGKETLIISSAKGKMRCVLSKDKGIELVNELGDIEIKCRKFTVEGEKGIQIEGKKKVTIKSEDKITIKGSKGIKLENGKEVKIKGKNIKLEASKGITAEGKQIAAEGDKVTGFDIHQMVIPSGKGTDVVPLPHPFLGKMADKLSKDVKIKGHNAAVKGSVAKHDDLMHNQLPGTIKFQQSPKKQGEVTGGTSGKVKINGKEAAVIGSTVTTCNDIGIRDNSVIIAAGASMPMPVIINPKNTAEYKEEREKEKKRKPEIKSVKWGKGSVKEGEE

SEQ ID NO: 106378 - protein, 286 aa, Unknown
  Obtained from environmental sample
  misc_feature (1)..(286): Xaa is any amino acid
AEYYNLLAETYLSINPDKDALEAYFGAAVGGDKAAAEKARPLFAKINGDASKFDAELERRQAALPFHPPAFVAPADWKGRTVLAELFTGSECPPCVGADFAFDGFIESYPSKYLAILEYHLPIPGPDPMMNPATKKRQDYYTVNSTPTRVIDGGNKVSNGGYRQHAKGLFDEVKKTIDAAMAEAPGLTIKANAKLDGDKVTVDCEFSKVIKNADYNVVLVQPEEKHKGGNGLALHKMVVRDFATVKSAAKATATFNIAESEKAADAYLNEYEKTMQARRPGFAWSP

SEQ ID NO: 106379 - protein, 210 aa, Unknown
  Obtained from environmental sample
  DOMAIN (39)...(116): Helicase conserved C-terminal domain
  misc_feature (1)..(210): Xaa is any amino acid
EGGGPKGSGRGRAAGASAALSERDGAVKTVDSVAEALGKGPLSAVPIHRLHGRMPSDERDAAVSAFREGPPGVLVSTAIVEVGIDVPDAAVMVIENPEFFGLAQLHQIRGRVGRGVADSYCFLLPGADACRDERTTERLKFLCGCSNGFEIAEWDLRRRGPGDAAGYRQSGWDDLLAADILEDAGMFMGILSEMDILFAKDQNGGANLPA

SEQ ID NO: 106380 - protein, 165 aa, Unknown
  Obtained from environmental sample
  misc_feature (1)..(165): Xaa is any amino acid
LKITGLNEPLSPEDSALMRNVQLAFSQYAEFSKKIGTDTLTAVEKTEDPERLANLVCNATHLKSEKKVELLAYTDTKERLLAILETLEFENEIYGIQKNISGKVRSRMDKRHREYILHEQLREINKELGKDKTEDEFALLEKKIADKKPTAEVTERTVKEIAKLR

SEQ ID NO: 106381 - protein, 241 aa, Unknown
  Obtained from environmental sample
  DOMAIN (26)...(230): Glycosyl hydrolase family 45
  misc_feature (1)..(241): Xaa is any amino acid
MKRTFFAAAAFFAVLAAASGAYAQQNGWMSRYWDGCKPSCSWSGKPNANNVGQCKECDKNNNKLNTSDQNRSSCDGGNAYTCWDMIPFADGSDPNKAYGFAATPSDRCGVCFELKFTGGAGGSAPSGATTQALNGKTLIVMGSNMGHDVGSGQFDLLVPGGGVGAFDAFSNQIGVSKSALGSQYGGLLAALGNPTALPTAQTQLKGKCSEVFGKSGLEWLTAGCDFYADWLMAANNPGADL

SEQ ID NO: 106382 - protein, 241 aa, Unknown
  Obtained from environmental sample
  misc_feature (1)..(241): Xaa is any amino acid
MNSNQTLTANFQQAQQTYTLTTNVYPSGGGTVSRSPAGQGSGGLNHAAGSTVTLTAAPATGYTFVNWTGEGVASPNNATTSVSMTANRTITANFQQQGGNVGSNGGGGNNNNGDIKLTIKIDPENSGRVDVTPKKDGYQQQEPITVTAVANAGYAFDRWDGDDLVDSEPTKSTVMWWHRTITARFKLKTATPTPPDSTPTGGGVVNPPPGGGTVDPPVDGGSVLRTDTAYIEAEDYSSKSG

SEQ ID NO: 106383 - protein, 57 aa, Unknown
  Obtained from environmental sample
  misc_feature (1)..(57): Xaa is any amino acid
VYSIIGDYDRAITDLSQAIELNPNLAEAYKNRSLAYYRKGDIARAITDMEAAAQLSQ

SEQ ID NO: 106384 - protein, 268 aa, Unknown
  Obtained from environmental sample
  DOMAIN (12)...(180): Radical SAM superfamily
  misc_feature (1)..(268): Xaa is any amino acid
MPAPPAGIVQLYVHIPFCESLCPFCSFHRVQFQPGRTPGYFEALRREIRSYHERGFVFGEVYVGGGTPTVDLPELLRTLELIRSLWPVHTISVETNPNHLNPAVLGALKSAGVARLSVGVQSFDDSLLKQMRRYEAYGSGAAIAERLAQAQGYVQTLNADMMFNFAHQTGASLEHDLETLLALGLDQVSFYPLMTAPSVRARMQQTLGASTPRRTFELYGQIVSAMSARYEPSSAWCFSRRAQPEAGPAMIDEYISRADDYVGGAAAL

SEQ ID NO: 106385 - protein, 221 aa, Unknown
  Obtained from environmental sample
  DOMAIN (16)...(197): yrdC domain
  misc_feature (1)..(221): Xaa is any amino acid
VGPARQVREAALSGAVALLAAGRVLAVKGVGGYHLLCDAASEEAVMRLRRAKRRPDKPLAVMFPQGGRDGLAVLREHAQLESAEAELLLSPARPIVLVRRRPGARLAAGIAPGLYEIGALLPYSPLHHLLLAGFGRPVVATSGNVSGEPVQTDPQEAQRVLSGVADACLHHDRPIARPADDSVLRVTHGKPRVVRIGRGAGPLELTLPGGFSRPGLGVGGH

SEQ ID NO: 106386 - protein, 253 aa, Unknown
  Obtained from environmental sample
  DOMAIN (1)...(253): Nitrogenase component 1 type Oxidoreductase
  misc_feature (1)..(253): Xaa is any amino acid
GIVGVIGDDVDAVCKAAEERHGIRVIPVKAPGFSGTKMHGYRLACDAIMTLVRPHAAAPRRFGVNILGDYNLAGEMWIIKNYMEEIGIPVVSTITGDSSYETLIKAPSASLNIVQCAGSSAYLAERMEAEFGIPYIKVSFFGVEDTSASLRRAADALGKPEISDNARAFAERRTAEVMPIIEKYRPRLEGKRAAIFVGGGFKAISLIRQFDELGMKTVVVGTQTGKKDEYELIGELVGGDAVILDDANPAEWS

SEQ ID NO: 106387 - protein, 144 aa, Unknown
  Obtained from environmental sample
  misc_feature (1)..(144): Xaa is any amino acid
NEFLISGTATGALPELTAREYCLVSAFDLEKNQVATSGPIQASSESMTHGAVYQVCPNVNCVIHIHSKKIFDAMLKERYACTPKDAEYGTPQIALAIGKCIREYGMNNEGQIVLAGHDEGVIAYGPTVERALDLILELYNKYGG

SEQ ID NO: 106388 - protein, 135 aa, Unknown
  Obtained from environmental sample
  DOMAIN (7)...(132): Phosphorylase family 2
  misc_feature (1)..(135): Xaa is any amino acid
MAQLKQCAVIGIIGGSGLDNPDIFSNPRDEKVSTPYGEPSSCLKHGTIEGVEVILLARHGREHTIPPTQVNYRANIAALKTAGCSHIVATTAVGSLREQIRRGDLIIIDQFIDFTKQRKMTFHESFEPHKPVHCP

SEQ ID NO: 106389 - protein, 267 aa, Unknown
  Obtained from environmental sample
  DOMAIN (68)...(261): Binding-protein-dependent transport system inner membrane component
  misc_feature (1)..(267): Xaa is any amino acid
VKKLNKAIILEIAAVAIFLLYMLPFLLVIINSSKPSLKIIMDPLAFPETPSQFITNVKTVFTSPNVRYASSFFSTLIITAISAALLVLISSMAAWVLVRTKTKLSYAVFMGFVAAMVIPFQVVMFPLITWFHLIEVKLGLFNTPLRLLQNYPGIIFAYLGFGSSLSIFLFHGFIKSVPLELEEAATIDGCTRPGTFFKIVFPILTPITVTVIILNSIWIWNDYLLPLLVLGSGNSVQTLPLAVASFVGSFVKKWDLILTATLMTMLP

SEQ ID NO: 106390 - protein, 217 aa, Unknown
  Obtained from environmental sample
  DOMAIN (27)...(170): Bacterial flagellin N-terminus
  misc_feature (1)..(217): Xaa is any amino acid
MIINHNMSAMFADRQLGVTQESLTKNMEKLSSGMRINRAGDDASGLAVSEKLRSQIRGLNQAERNIQNGVSFIQATEGYLQETTDILHRIRELSVQSANGIYTDEDRMQIQVEVSQLVDEVNRVASHAQFNGMNMLTGAFAMDSTSGRTMQFQIGANMDQSARVFIGNMSANALGLNNAQGDEGKISIDDPAKANQAIGTVDAALKIVNKQRADLGA

SEQ ID NO: 106391 - protein, 196 aa, Unknown
  Obtained from environmental sample
  misc_feature (1)..(196): Xaa is any amino acid
KRDILNELRASKKEILDLTISSPTQIGLTFDIAEDLHYLAENPEWQFCTPDACGQLYAREAIAKYAGHNSDDVFVTSSTSEAYSALFRVFCEKGDFILTPNPGYPLIDSIAELDGLNTHPYFLKPDFNKNIWEIDLDSLDSIPQNAKILLLISPHNPTGHTPTEQEFEHILQFCEKNNLTLIIDAVFNAYTHSVST

SEQ ID NO: 106392 - protein, 275 aa, Unknown
  Obtained from environmental sample
  misc_feature (1)..(275): Xaa is any amino acid
MAYINVYMKMMVTFGWAFPDDNPSYYGELSGKNVMEYAHWFVTGTTSDAKLTILLLDIKDNYDGVSNKSYFGGYFTSLNLFPNMNDPRNPLLKYSNELDMIYMDTHPAVPGSDDSNRTLAHEMQHLINYVSSIAFRTVSDSSGNITSIDFMDTWVDEGLSGAAEWVYSGVHPKGRWEYYNKDESGLIKKGNNFFIWDNHKGESPYANLDDYATVYLFFQWLRLQSNEPKDIYYNIISSEFHDYKAVMEAADSNNWQSLLRDWLAANYTNAPNGRY

SEQ ID NO: 106393 - protein, 232 aa, Unknown
  Obtained from environmental sample
  DOMAIN (11)...(232): Aminotransferase class-V
  misc_feature (1)..(232): Xaa is any amino acid
MPAKDSCTIRHYFDWAASSPFDHGIINQENDMAVFGNPSSQHCEGKAAKLALEDARKRCAAVLNVPPETLFFTSGGTESNSIALFSNLVRKGQGKIVSSLAEHSSVREGMETLERMGKLTGRIAVDSEGRVTPDILEKTLSKYGDVRFASCMAVNNETGTITDIASLADVIRKKSGAPVHFHCDLVQAIGKIPVDIQGWQIDSASISAHKIGGPRGIGLLYLCRPAQSNEIF

SEQ ID NO: 106394 - protein, 154 aa, Unknown
  Obtained from environmental sample
  DOMAIN (19)...(154): FtsJ-like methyltransferase
  misc_feature (1)..(154): Xaa is any amino acid
MADYSKSDHWSQKAQKEGYPARSVYKLKEMDEKFGLLKNARPGFRTLDLGAAPGSWSLYILRKFPFKAEALETGGAEPPTPTPTLVSVDLAPLSRQYDGGLFDRPDFLFLRGDFTSGEIRETVASHGPYNLIVSDAAPFTTGNRSVDTLRSLDL

SEQ ID NO: 106395 - protein, 230 aa, Unknown
  Obtained from environmental sample
  misc_feature (1)..(230): Xaa is any amino acid
MITCGALVIYKNKPAIVKDQADGKFSIALQNGEQVKVRDKDIEVIHTGPVNNFNEIERGSSAVSAVREVWELLAGEGASLSLKDLAGFICSEYTPSSAYTAYCVLKDGLYFCGNIDSITPQNRDYVTAEESKRAAVRLESGERMQFLDRLKACIKNPANNKLLPEDTRFLQDVEALAFGKSVKSRTMRDLTLSETPEDAHSLLLKTGFWTGMVNPHPSRFGVSLSGASVC

SEQ ID NO: 106396 - protein, 263 aa, Unknown
  Obtained from environmental sample
  DOMAIN (1)...(135): Glycosyl hydrolases family 2, sugar binding domain
  misc_feature (1)..(263): Xaa is any amino acid
GWEARVIREDEGLKEKWQSPETGLSAWDDITLPGDFASAGPEADRPLSNFCGVIWLCREFEVKADFVPYEAKVWLGTIVDSDTVYINGVEVGNTGYRYPPRKYRIPAGLLREGRNRIVIRVTCVNGQGEITRGKPCRVFSEQACVELAGTWKYRIGAKAPPHPEAFFFQRHPMGPFNAMIAPILKYPFKGVIWYQGESNDGSSGDYEVLFKAMIRDWRNKSGQENLPFLFVQLPIFGSPTENDESSSWATITEAQRAALSLPA

SEQ ID NO: 106397 - protein, 132 aa, Unknown
  Obtained from environmental sample
  misc_feature (1)..(132): Xaa is any amino acid
MKQTSLRTFGPVAWAALVLLGFSSGLPLALTDSTLKAWLHESGIDLKTISFFALVGLPYNLEFIWAPFLDRYSLPFLGRHHGWMLVTQLLLAGALFFISGTDPNGGLACIGALALGISFLSASQDIVADAWR

SEQ ID NO: 106398 - protein, 272 aa, Unknown
  Obtained from environmental sample
  misc_feature (1)..(272): Xaa is any amino acid
GSFPEDTPKEIWIAAGTYKPGGAADDYFPLSANTSYIGGFAGHETAKSQRNIAANPVIISGDLGAGTYSRNLFSSVHALSGDLSFDSLRFTNASVAVNAALGSHGVLNVTDSAFDNLKTSDSGAVYVRGGGADISNSSFNLCNGGALFVQGTTAEIRDTKFSICTGSGVLRLDCSGETAITRVTVEDSSGLSFSGDGNKTLEEVSVKRGGSVNVLNSDGNLRITNSDLTDISGNGVSLDNLTGNAEINSLNLRNISGYGIYGFNSSLGILRI

SEQ ID NO: 106399 - protein, 123 aa, Unknown
  Obtained from environmental sample
  misc_feature (1)..(123): Xaa is any amino acid
MNGGTISNNTTSSNTTATSGGGGVYSSGSCFTMQNGAVISDNSFVYNFEGGNFFGGGVYVYGGKFILEDGTISGNSLIKISGNNGWGGGVAVHGGGTFIMNGGIISGNTSSQGGGGIFVVQGG

SEQ ID NO: 106400 - protein, 264 aa, Unknown
  Obtained from environmental sample
  DOMAIN (1)...(264): Amidohydrolase family
  misc_feature (1)..(264): Xaa is any amino acid
LWWRLDKQLTLDDVYYSCIGPMIDEVRSGVTSVIDHHASPFAVECSLFKIAEAAKLFGLRSNLCYEVSDRDGEKIALAGIKENVDFAKYCKEQNDDMIGALFGMHAQMTISEKTLALCVEAANNSGLGFHVHAAEGIEDVIDGISKYGMRVIERLYKSGVLSKKSIAVHCIHITPEEMDMLKESGVAVVHNPQSNMGNAVGVSPVLDMLKNGVLVGMGTDGYAADVLESYKTAAILHKHAKALPSVAWAEPPAMLFENNKTIME

SEQ ID NO: 106401 - protein, 273 aa, Unknown
  Obtained from environmental sample
  misc_feature (1)..(273): Xaa is any amino acid
FSSALNEKGEISGIDINAIVNLGSHAVNANEILESVNLGATGVYKVKNIRFTGSAIKTNIPPQGPLAGYGLAQGFFALESHISHIADSLGQDPAQWRKQNLHAGVFQKGFSNKGSVAKGAALKSKGGAPPSGNPLIDNVINISDYRRKWAAYEVLKSVRKKNSEAAMIPEQGPLHRTPYSHLANWMERTEGMRGIGIALGYQGHSDDSDAHPGSVELTLNKEGVLEIKTGILDSDRGIWVRLASKNLEIDPKKVRINYNAESRDFGPFTTRNI

SEQ ID NO: 106402 - protein, 91 aa, Unknown
  Obtained from environmental sample
  misc_feature (1)..(91): Xaa is any amino acid
AYDFVHDMCANGQQLKCLTVIDEYSREALAIEVSGSIRSERVMEVLSRLFSERGMPQFLRSDNGPEFEAHKLRDWTASPGVKQMLTAPGKP

SEQ ID NO: 106403 - protein, 86 aa, Unknown
  Obtained from environmental sample
  DOMAIN (4)...(56): Imidazoleglycerol-phosphate dehydratase
  misc_feature (1)..(86): Xaa is any amino acid
MSEDGKEYKFQTGLMEDFWQGFVNAAGFNLHLEILRGRSDHHKIEALFKSAARAIRVACEIDERAKELIPSTKGSLPGFDSPGALV

SEQ ID NO: 106404 - protein, 159 aa, Unknown
  Obtained from environmental sample
  DOMAIN (37)...(155): CobB/CobQ-like glutamine amidotransferase domain
  misc_feature (1)..(159): Xaa is any amino acid
VIGVIDYGAGNLGSVINALKRLSVPARFVAGPQELSPSSSPFEKIIFPGDGHFATAMVSINKSGYSQAIKEWIKADKPFLGICIGLQLLFDSSEEAPGAQGLSIIPGTVRRFPGRKVPQIGWNQTSTRKESKIFRGLTDNSFFYYIHSYYADPSDDSVS

SEQ ID NO: 106405 - protein, 265 aa, Unknown
  Obtained from environmental sample
  DOMAIN (12)...(264): NADH dehydrogenase
  misc_feature (1)..(265): Xaa is any amino acid
MPEMTLFQTLLIALIQIVLAITFVFVVVPLTIFAERKVIGFLQQRLGSTRVAGRLIGVTAMQNRFMWFMGWFPFAHYFRGLPGIVGDIAKLFFKEDVKLAKSDRAVYLISPAIAMIAAVMTYSVICFYPGTLFTIPSFIPLIGGLPVAGAIANINVGLLLLLGFTGVGVYGIVLGAWASNSKYPLLGGLRSAAQMVSYEVPLTLSLCVPIVLAGSLNLADMARGTAIDVSPWGIPSLFAGFFIYMTCGFAETNRLPFDMPEAEAE

SEQ ID NO: 106406 - protein, 78 aa, Unknown
  Obtained from environmental sample
  DOMAIN (1)...(57): NADH ubiquinone oxidoreductase, 20 Kd subunit
  misc_feature (1)..(78): Xaa is any amino acid
MPEPKWVIAMGSCATCGGPFDSYAVIQGVDKVVPVDVYIPGCPPRPESLIYAFMKLQDKIMNSSLADKYREVFEAANS

SEQ ID NO: 106407 - protein, 132 aa, Unknown
  Obtained from environmental sample
  misc_feature (1)..(132): Xaa is any amino acid
EFLNAGKTFEDALKTRTYEPDAPNYTPRISGIFYPNGSYTLSILKTSDKQNPKRESILIEKETGTPNMGEMLTTYECDGDPLQSFIGLPRLMPIKNTAQENLDFYWDMLNPKYRVSILVNWQNSILIRNANV

SEQ ID NO: 106408 - protein, 138 aa, Unknown
  Obtained from environmental sample
  misc_feature (1)..(138): Xaa is any amino acid
MNKFVRGGLTLLLAAGLAVVGAFWLSGVSKKSAPEPQIFGSASESEPAVEIEAEEAPDTPPDTASFTDSRDAVTYRTATISGKIWLAENLRYKAKDSWCYGGDSSNCGKYGRLYAWNAAKTACPAGWRLPVRLDWLAL

SEQ ID NO: 106409 - protein, 121 aa, Unknown
  Obtained from environmental sample
  DOMAIN (17)...(112): Peptidase family M23
  misc_feature (1)..(121): Xaa is any amino acid
MPATGWITKLFSTDKAEAHLGVDIAATNGTPIRATAVGVVEDVRNDKYYGMTVEVRHENGYLTRYGHCSQILASIGDRVNRGQTIALVGNTGRSTAPHVHYEIMKYGKNVDPMDFIGAHKQ

SEQ ID NO: 106410 - protein, 124 aa, Unknown
  Obtained from environmental sample
  misc_feature (1)..(124): Xaa is any amino acid
VQAFTLAHLDHGRAWHGFDYCYPVISRRSGGLSLGVNLNLDQACNFDCVYCEVDRRNPPNRTDIDLGQLEDEMKTLIELAISKELFRAGSFGMAEIEHQRFNDMAFSGDGEPTAAPKFPKAVLV

SEQ ID NO: 106411 - protein, 256 aa, Unknown
  Obtained from environmental sample
  misc_feature (1)..(256): Xaa is any amino acid
ADGPLALLRFGPAGEIPRLTQITAMFNQPMVPLGAYDQVPAGVLNLTPDLPGRRLWLNQYTLAFVPERPLTGSLKIKAALRADRLPAAISGARLKEDATAEIRLPLLEVQRRQMLGDGVLETALTPGWRVVFNQPPDPASLERRAYFIWSEGWSERKLAARVAPSQENGSLSFEFTAPEPLPRDAAYRLVLQAGAKSLAGPEPAPELLLAEGRTYGPFTIGWTEPRDPDLAAWPPQWGPPTVAFSNPVDLARILPL

SEQ ID NO: 106412 - protein, 206 aa, Unknown
  Obtained from environmental sample
  misc_feature (1)..(206): Xaa is any amino acid
GSFKVLTYRPPALEVKIEGLPERALAGDRVDLGVQADYHFGAPVAGQPVKWSAHYQPARFRLPGPYADYSLEDNISRSEENDGPEEPEEAAEVLASAAGGLDREGNLKFSVNLAAPADRPPRPRFLNTNVTVVDVDGRPVSASGRFLVHPASVYAGLSIPLLGRAGEEQAVNFIVADLEGRLVPGVRADLTLYRRDWRSVRRKTPG

SEQ ID NO: 106413 - protein, 233 aa, Unknown
  Obtained from environmental sample
  DOMAIN (82)...(233): Phosphatidylserine decarboxylase
  misc_feature (1)..(233): Xaa is any amino acid
MLQMNARDLKTVEMSYRDNLFIRFLYNTAPGRAALRLVTARPISKLVGVFMNSRMSRLLIRPFIRRNRIDMSEYTPKKYASFNDFFTRKVKEGRRAFSKVLSDLPAPCDGKLTAYGIAANSAFQIKGSVYTLKSLLQDKALADGFAEGVCLIFRLTPDDYHRYAFIDDGEIISHKRIKGVLHTVRPIANKRYNVYAQNTRDYAVMNTKRFGKVVQMEVGALFVGRISNRPLKD

SEQ ID NO: 106414 - protein, 253 aa, Unknown
  Obtained from environmental sample
  DOMAIN (53)...(245): Adenylate and Guanylate cyclase catalytic domain
  misc_feature (1)..(253): Xaa is any amino acid
MLGELEKAYNQIKRYAFDAVLAGKKEQRVRQIFQKYVPKDVIDKCFATQGSMLKIGEDRNLAILFSDIRGFTTISEQFKNNPENLVESLNRYFSDQVDIIMNRNGIVDKYIGDAIMAFWGAPVNHNDDALQSVLSALDMIDALTGFNEYQRKAGKPEFQIGIGINYGLVTVGNIGSERKMEYTVIGNDVNLASRMEGLNKIYKTELLITDSVYSRLPQKQLACRLLDIVAVKGKKEGVRIYTVKRNLSSNEEK

SEQ ID NO: 106415 - protein, 156 aa, Unknown
  Obtained from environmental sample
  DOMAIN (58)...(154): Methyltransferase domain
  misc_feature (1)..(156): Xaa is any amino acid
MPYKQEWFNDEDFWEQYAPVMFDESRWAEVPTVADGVTRLACLNLYGGKTRRPGPTVLDLCCGFGRITLELARRGFCATGVDITGSYLETAREDAAHEGLSIKFIQKDVRSFKRKEAFDVAINLYNSFGYFENPEDDLLFLKNAYYSLWEGGALII

SEQ ID NO: 106416 - protein, 280 aa, Unknown
  Obtained from environmental sample
  DOMAIN (1)...(123): Thiamine pyrophosphate enzyme, C-terminal TPP binding domain
  misc_feature (1)..(280): Xaa is any amino acid
MGFGVPSALGACIASNGKRTICVNGDGGFQMNIQELETIKNRNLPIKFFVLNNQGYGSIRNTQRNYFGGFYVGSSQESGVSLPDVKALGSAYGYKVFSISNNDEIDSVVRDVLNTDGPVLCEVLIDPNDTLCFRASSRIRPDGSAVSTPVEDLYPFLPRKEFYKNMYIKPLNATGINITTVLFDLDGTIIDSKPGILSSMKSALNDVGATNVDDAAIAKTIGLPLKDMIAKLQPDIDDEQTDKIIASYRKHYNENGVYNCALFDGIDNALQDLFKRFDLY

SEQ ID NO: 106417 - protein, 287 aa, Unknown
  Obtained from environmental sample
  misc_feature (1)..(287): Xaa is any amino acid
GQQRLTTLSILLSLLKNEYPREKYPYVDLSWYKELNLEFDSRKNSTKTLHYLFDGENTDDKRNTDDKNYDIAIKQGYEIIRKVLPKILAEKEVNLDIGDFCMYLFEKVKILRVLVPEDTDLNHYFEIMNSRGAQLEKHEVLKERMVELLDEQDGYVFNLIWEACSNMERYVQYGFSWEQRDAIFGSNDNDGNKWNILSDMSTVYGNLTKPTTDNEKSDRVSIINLLRRGAEQILVNQTSDKESPPERFNTIIDFSNFLLHILKIQAQSQVKYEIPLDDKQLIEQFEP

SEQ ID NO: 106418 - protein, 226 aa, Unknown
  Obtained from environmental sample
  misc_feature (1)..(226): Xaa is any amino acid
MDLSDTLYLMNCGFVYQLKNLYGPGIAHFESQMNLVNRSGKLLFILSALHKSLYNFKKTKEYSELALKRMPYDEEATVNLSDALWGLGQRAYSLEVAQTLYEKYPTERLGIYVAKTLMGLNRYSEAADLLLDVKKMFGPSSKLAMVYTEVLLFLNRNEEALSVSEEALLKDKKNADLLIAKGKSLFYLRSYKAAEQTFNQALAIKSESEDAKSYLSATKAFLGKAD

SEQ ID NO: 106419 - protein, 247 aa, Unknown
  Obtained from environmental sample
  DOMAIN (1)...(247): Na+-transporting methylmalonyl-CoA/oxaloacetate decarboxylase, beta subunit
  misc_feature (1)..(247): Xaa is any amino acid
MFVPVEGLYYFISQGVQLELFPPIIFLGVGALTDFGPLIANPRTLLLGGAAQLGVLFTAFVAVVTGVFTLGEAASIGIIGGADGPTSIFLSNKLAKHLLGPIAVAAYTYMALVPLIQPPIMRLFTTDHERKIRMKSLRSVSRLERIVFAMVVMVACIIIVPDVSALIAMLMLGNLLRECGVTDRLVKASQNEIINVVTIFLGTSVGMTMQADLFLRPTTIMIIALGVVAFGVSTAGGLLFAKLMNVL

SEQ ID NO: 106420 - protein, 67 aa, Unknown
  Obtained from environmental sample
  misc_feature (1)..(67): Xaa is any amino acid
MIFNVESECMEVQARRKLQLANLKNLVEGLYARVPFYRNKMKEMGIQPGGYTFPGGYPETPVSTKDD

SEQ ID NO: 106421 - protein, 210 aa, Unknown
  Obtained from environmental sample
  misc_feature (1)..(210): Xaa is any amino acid
DRDNIEVYGTAGDNYELANVDISLRPGDKFFYSVPEAIRGLYFDVKGFGATYCDTGLGLSFFNDNVRLQAQFGLAPPDGFNTAFGIGGRYVGTVVGIKLLANIFYLPFAYLFGLDWAFYSMNFAVGANFSYFTMDETPPPEGRSGLYIGAVVAQWDIANINMQYFYPQWKYFRNFALYLEPELWFASSDVKTDNETIIFRMTVGMRLNWF

SEQ ID NO: 106422 - protein, 173 aa, Unknown
  Obtained from environmental sample
  misc_feature (1)..(173): Xaa is any amino acid
SYNENGELLGYIEYEDDSKGNLIKIRNYNENEELSGYSELERDFKGTLTKVSHYYANGEFLSSTNMEYDSEGNKTKDNHYVNAEFSYTKYEYDSKGTQTKWREYTSSGELLDYGESEYDSNGNLIIWSHYHADGKLSFKAEYEHDSNGNIKKRRDYNANGELYSYTVYLYKEI

SEQ ID NO: 106423 - protein, 248 aa, Unknown
  Obtained from environmental sample
  DOMAIN (121)...(248): Mur ligase middle domain
  misc_feature (1)..(248): Xaa is any amino acid
MYKKGNPEVFAGMKVTVMGLGLNGGGLESAKYLALHGAECTVTDMKDEEALASSIEKLETLQAPHPPFRYVLGRHEMEDFSRANMVIKNPGVRPDSPYLAAARRIETDISLFLNVSPARLIAITGSKGKSSTASAVHWVLNKARENSLLSGKAFLGGNITISPLSFLDELSEKDDVVLELSSWQLGDLKGRTQSASGGLPRSLLKPRAAILTSIMADHLDRYGSMEAYVNDKRIIYQGQDREDATIAC

SEQ ID NO: 106424 - protein, 83 aa, Unknown
  Obtained from environmental sample
  DOMAIN (8)...(80): DnaB-like helicase N terminal domain
  misc_feature (1)..(83): Xaa is any amino acid
MSDYYSKEYPQAIDAEVWLLGGILQDPKSLSEVSLILRKGTEFYLEKHQAVWNAMVSLTESGSPIDVMTIADVLEKNGQTRRW

SEQ ID NO: 106425 - protein, 263 aa, Unknown
  Obtained from environmental sample
  misc_feature (1)..(263): Xaa is any amino acid
MRKRSEDTSFFTIIPIPVLRDESLNPNAKLLYAEITGLTKQEGYCWAQNQYFAKLFKTSERSIVRWLGELQAGGHISVQYRYFPNSKKIAKRLIYCTFSAKKPAAPLPDGEEKLHIYAENCIPPGPLEDLVVTRVSPLDGLVVTGMSPPSGETGVVDNNINSNRSSSSDPLEIDETEKGLSGEEEGFENLDNYAENRISENPPEESSPLADPLPEVSREKAFDVPSLKRLLRGLDPSFVFSGPFYQNALGFLASNGLDGGYVS

SEQ ID NO: 106426 - protein, 84 aa, Unknown
  Obtained from environmental sample
  misc_feature (1)..(84): Xaa is any amino acid
MDFTEYNLGFCNKGEVVQITLSSAANVILLDTTNLHKYKNSMKFEYHGGHTNLSPYRITIPESGTWYVVIDGYSGTIKSSVSVA

SEQ ID NO: 106427 - protein, 261 aa, Unknown
  Obtained from environmental sample
  DOMAIN (3)...(105): Histidine kinase-, DNA gyrase B-, and HSP90-like ATPase
  misc_feature (1)..(261): Xaa is any amino acid
MGEVELSFSAEASGAGAPGTGAYGPDKPVILVLRISDTGQGMTQEQLDRLFDDYTRFNINPKRQIQGTGLGMSVTKRFVDMMKGEITVKSEPGKGTEFIIRIPQGYVDSGILGKDGTENLQKLCAEREAKENAPGIIREYMPYGKVLVVDDMEPNLYVINMVLAPYGLKISTAKSGKEAIDKVQSGMVFDIIFMDHYMPEMDGLEATKIIRGLGYKNPIVALTANALVGQARIFLENGCNGFLTKPIDTRQLNATLNKFVR

SEQ ID NO: 106428 - protein, 254 aa, Unknown
  Obtained from environmental sample
  misc_feature (1)..(254): Xaa is any amino acid
NVGDNKPVTLSEFTLVGEDAKNYEYTTPSITATITPKSLTITGITAVSKDYDGTTDAVIKTENVNATGIIDGDEVHFDVVGTASFTDKNVGEGKAITLSGFKLSGKDAKNYTITAESISSTTANITPKPITIEDITANKEYDGTTAATIKGKLKGVIGEDDVTFEQGTASFDNKNAGNGKTVTFSGFTLAGNDKGNYTLSTQSGSVTANITPKLVTVTSIANTKVYGDTDPVLTYNVTPALVMGDKFIGALSRN

SEQ ID NO: 106429 - protein, 220 aa, Unknown
  Obtained from environmental sample
  DOMAIN (17)...(137): HD domain
  misc_feature (1)..(220): Xaa is any amino acid
LPCAGALNKKGFHRFDVLEHSLLACDYAAEKKYPLEVRIAALLHDVGKVPTRERDELGIWTFYRHEVESGKMARSILGRLRWPNALIDLVCHLVKEHMFHYTDDWSDSGVRRFIARVGEENLAMIYQLRRADAYATAAVEPGPGFLIPLADRAEKILEEKQAFSLKDLAINGNDLIGIGIPPGKSIGIILGELLETVLDDPAQNTRETLLKIASYMRDKP

SEQ ID NO: 106430 - protein, 202 aa, Unknown
  Obtained from environmental sample
  DOMAIN (20)...(201): Metallo-beta-lactamase superfamily
  misc_feature (1)..(202): Xaa is any amino acid
LADKKKRLKIYSLGGMQEIGKNITILEYDGEMLVIDCGVAFPEDDMLGIDLVIPDYSHLQRNKDKVKAVVLSHGHEDHIGAIPYFLREFNVPIYGTRLTLGLVENKLKEYNISGARLITVSPGGSIDIGPFNVEFIHTTHSIADSVALAVATPVGVVVHSGDFKVDYTPIQSESINLQRFAELGKNGVLVFLCESTNVEQKG

SEQ ID NO: 106431 - protein, 84 aa, Unknown
  Obtained from environmental sample
  misc_feature (1)..(84): Xaa is any amino acid
VTIDRELCQIVAGPDITSRGFVYIKESEDLMDEAKNVVRAALSGCGDKLKEWHFVRGLIKEALKEFLWQKTKRSPMILPIIMEV

SEQ ID NO: 106432 - protein, 270 aa, Unknown
  Obtained from environmental sample
  DOMAIN (125)...(154): Helix-hairpin-helix motif
  misc_feature (1)..(270): Xaa is any amino acid
TNCSVCGSALVDAGTRLYCPNTGCAKRLLHRLEKWISVLDIRELGDKLIRQLFDKERVRHIPDLYTLTTDELSVYERMGELSAAKVVRHIQTKRELSLSVFIAGFDLEGVAETTMEKVVSAGFNTLEKLRQASVEDLAGVYGLGEITAKVIVDGLAETAAEMDEVLAKGVISIAGPPSEESQPMRGLSFCFTGELSSMKRPQAEEKIKALGALAKSTVVKGLSYLVTNDPASGSSKNKKARELGVPIINEVEFLKLLADSVIDGAKPVQG

SEQ ID NO: 106433 - protein, 258 aa, Unknown
  Obtained from environmental sample
  misc_feature (1)..(258): Xaa is any amino acid
GRFAATTFFIIFALLIGLGVFAMINLPIDLYPEVNPPFLVVYTSYTGAGPEEVERTVTRILEAALSGVSGMEKITSTSSKGSSLVFMEFTFGTNLEDASLSIRDALERIRRIMPTNADTPMIFKFDPSMIPIMGLMITGNRTPEELREISEDTIVPRIEQTPGIATASVNGGREKIIRVEIPQNRLEAYGLTVTQIQQMLGAQNIQTSAGTIIEGGMSYILTTMGEYRSLDEIRNTVVSYKGGGYTGAQVELPRQVYL

SEQ ID NO: 106434 - protein, 95 aa, Unknown
  Obtained from environmental sample
  DOMAIN (1)...(95): Phage Head-Tail Attachment
  misc_feature (1)..(95): Xaa is any amino acid
MGTSATITSGEQSGAVIRGVFDDPENISYAGQGVRVEGSSPSLFVRTDEVRQLRRGDTLTIGEENFWVDRVSPDDGGSCHLWLGRGVPPAVNRRR

SEQ ID NO: 106435 - protein, 150 aa, Unknown
  Obtained from environmental sample
  DOMAIN (3)...(150): Prophage minor tail protein Z (GPZ)
  misc_feature (1)..(150): Xaa is any amino acid
MAIKGLEQAVENLSRISKTAVPGAAAMAINRVASSAISQSASQVARETKVRRKLVKERARLKRATVKNPQARIKVNRGDLPVIKLGNARVVLSRRRRRKKGQRSSLTGGGSVLVVGNRRIPGAFIQQLKNGRWHVMQRVAGKNRYPIDVV

SEQ ID NO: 106436 - protein, 262 aa, Unknown
  Obtained from environmental sample
  misc_feature (1)..(262): Xaa is any amino acid
MILKKNASRQDLDRYWNILDASGRNDVRINAVIDIKAVPETIRSDKWEGELMSALRDEDKPLVEAAYSYEDFIGGYLLVEEDETALDAILTAMIRSGFAGAVRHVNQLLDAKVVGVINSPAPLPNSNTAYIPLDVLQDEAGMMLEGAVTELVIREKNSPDSRLPGKSESAAAISAALERGLAANGQTMPAELVVHTWEEYMRNYLGFEALENSMPQMVAALLLLLSFLGISNTILLAILERTRETGMMRAMGMTDRQMILVY

SEQ ID NO: 106437 - protein, 231 aa, Unknown
  Obtained from environmental sample
  DOMAIN (1)...(231): Protein of unknown function DUF111
  misc_feature (1)..(231): Xaa is any amino acid
MLTEHPVDQIHFHEVGNLDAIADITGVCMLMEELAPQKIIVSPVHVGSGFVHCAHGVLPVPAPATAHILTGVPVYGGRIKGELCTPTGAAILKFFADDFAPMPQMRIMKTGYGMGKKDFEAANCVRVFMGETDLYEGGPNGFAVELRCNIDDMTGEALGFACHTLMEAGAWDVYTAAADMKKDRPGVLLTCVCDEEKADMFASLMLKHTTTFGVRKEILSRYMLERKIETK

SEQ ID NO: 106438 - protein, 107 aa, Unknown
  Obtained from environmental sample
  misc_feature (1)..(107): Xaa is any amino acid
KQSFACLSSRFPYGEEINPQRLGMIDKAEQFLLDMGFRQVRVRYHGNLARIETDADGFALMLSPEKREKVHTALKETGFTYVALDLLGYRTGSMNETLKETVNNPDS

SEQ ID NO: 106439 - protein, 229 aa, Unknown
  Obtained from environmental sample
  DOMAIN (99)...(229): Stage II sporulation protein E (SpoIIE)
  misc_feature (1)..(229): Xaa is any amino acid
VDALSVGADDTISKPLRSQEMLARVESAFRIIEMQKEIKQQNRELTIYREKVQGEMELASRLQMSLLPDVGTIGPYQYTHRYQPVGGIGGDIYAITPLPFGGAALLVADVSGHGVTAALISAIVKTSFDYHIRTRGGPLAWAQSMNRDLKRNTMDEQFATALLAKFDPAAGTLTYVCAGHVPPIYISQSVPVAPGKNQPQAAPIALGGASPPLGMDEGMSFVEHTIDFA

SEQ ID NO: 106440 - protein, 246 aa, Unknown
  Obtained from environmental sample
  DOMAIN (9)...(245): Respiratory-chain NADH dehydrogenase, 49 Kd subunit
  misc_feature (1)..(246): Xaa is any amino acid
VCIGINGVDIGAFSSYLYLFHERETIYDLLEMAAGQRLHTSFARIGGLMRDIPKDFVPLCQKFLESCPKTIDEMERLLSRNAIWVDRTKGVGAFTPEQAISWGYTGPCLRACGMAHDLRKAQPYLGYETYDFDIPVGTTGDVFDRYLVRAEEMRQSLLIVKQCLQRIKEIGPGPVLIQDYKVALPPKEKVYSRAECLMHHFKLVMHGINMPEGEIYSATEAANGELGFYIVSTGGKSPYRHTRAPT

SEQ ID NO: 106441 - protein, 284 aa, Unknown
  Obtained from environmental sample
  DOMAIN (174)...(276): HD domain
  misc_feature (1)..(284): Xaa is any amino acid
IRVWQRQEKRSFLVDDNPINLKLARNTLMSKYDVFTVPSAAKLFELLEKTMVDIILLDVMMPEMSGYDAIKVLKNNPRTASIPVIFLTSKSDANSELEGFVQGAVDFVSKPFSPQLLVKRVDVHVLVESQKKELEHINQNLQRLVEEKTEEIQELQNAILKTMSNLVEYRDDVTGGHVERSEYFLKLLTEEMLRQNVYYNEVKDWDMKLFFKSSQLHDVGKIAIRDNILMKPAKLTAEEFNEMKRHTFFGEKVIEKIQENTKESVFLTHARIMAGTHHEKWDGS

SEQ ID NO: 106442 - protein, 209 aa, Unknown
  Obtained from environmental sample
  misc_feature (1)..(209): Xaa is any amino acid
MKRKFFHIIPVLFVFVSVSAFAQTTLFKPFTSFRVIQTGHFDIIFPKESEPSARLLASYADRVYEQVSSLLGIEVRGRIPVTITPHTDSFNGYFNTIYNHIMLFDTPMDVEWTNFKNNLESLFLHELTHAVSMNTTSPAFETFNRIFGNWIAPALIYAPQFMVEGVTVSFESLDGFGRANDPRTKQYLRQAIYEDKFLTPFQASGVYDR

SEQ ID NO: 106443 - protein, 92 aa, Unknown
  Obtained from environmental sample
  DOMAIN (6)...(90): Nucleotidyltransferase domain
  misc_feature (1)..(92): Xaa is any amino acid
SIDILIKAIRQSNLLNKYMLKQIGIFGSFARGEPANDIDFYVDTDNCKLADLKKLKRELEILTNKKIDIMIKKYANPIVLHRALKDMVYVSA

SEQ ID NO: 106444 - protein, 110 aa, Unknown
  Obtained from environmental sample
  misc_feature (1)..(110): Xaa is any amino acid
LLQGKKIEGTGIVMQKLEFRMLTDSLLSDPFSIEEYIKIGGFSALKKAAAMSSEDVISEISKAKLLGRGGAAYPVGKKWEHLLHIEETPKYIVCNADEGEPGTFKDRFIM

SEQ ID NO: 106445 - protein, 238 aa, Unknown
  Obtained from environmental sample
  misc_feature (1)..(238): Xaa is any amino acid
VNSLFTTSGYGLMEYVTPDKKFNAELGLRVDHYYLLGDGFSCQTKPALNPRLNADFNAFKNKWIFESLDISAGTGLFSTLDDTVFMAEKEHNLSEIKPGRSWTSVLGARITFPEGMTLNIEGYYKYIFDRMYIPVRITPEDISIRPQFDGEGRVWGIDMMLQKLQSRYWDGWLSYSYSWAKYRDPSGGNANMGISGGTRGNDWYFPGFHRFHNLNLVVNIKPSPQFNLYTRFGLASGT

SEQ ID NO: 106446 - protein, 131 aa, Unknown
  Obtained from environmental sample
  misc_feature (1)..(131): Xaa is any amino acid
VTFNANGASGVIAPAQTVNTGSAITLPNWDGLSKTGHAFGGWSADDSGEENNYNAGAFYRPGGDITLFARWNALPYTVSFNSNGGNALPGQTVYYGSRAERPEDPVKTGYTFVNWYNDSALTNEYNFFSPV

SEQ ID NO: 106447 - protein, 230 aa, Unknown
  Obtained from environmental sample
  DOMAIN (33)...(230): Bacterial extracellular solute-binding protein, family 7
  misc_feature (1)..(230): Xaa is any amino acid
MKISLWKAMCTGLLCAAVLLTACKRDQKVVIKVGDTWSPTHPIARSIDEVFKPQVEQKSKGVITVEAYHSQVLGNEHALWDSVRNGSIEMAVVGSGMNGEYSPMLISDWPFLYRDITHAKNVWTGGFFDDFKKDFEKAFPTTRMLSVGPNSSRTFTSNKRLTGISDFQGQKFRMPSNPIHVGIATDLGASVQIIPLNELYNALKAGIVDGQDNGMVTVLSEKLNEVQKYL

SEQ ID NO: 106448 - protein, 279 aa, Unknown
  Obtained from environmental sample
  misc_feature (1)..(279): Xaa is any amino acid
KSYTIETADIMLTNPTKTAYTFAGWTTGANDTTPELTVFIEQGSTGNKSYIANWTPNIYTITFDAKEGTVELESDTTVPGGKLTSLPTPILEDNFFEGWFIDAADNSVVKVTTNYVFGGNATIYAQWTPIHTITFNANGGSVSPATAKTGSGGKLASWPTATKAGYALDGWFTEDSVKIPKTKAFDDDALLYAHWVTGYAVTFSAGANGALTAKVNGDSIATGAMVAQGWNVVFTAVPDSGYEVDGWTVNAVADTADTAKSTYTLGHITAAATVSVSFK

SEQ ID NO: 106449 - protein, 84 aa, Unknown
  Obtained from environmental sample
  DOMAIN (8)...(63): Hemerythrin HHE cation binding domain
  misc_feature (1)..(84): Xaa is any amino acid
MTKTNFPGYMAHKKIHDEFTMTVLKSVKDFESGKRLVLEKFAYFLKDWVLTHVAVEDVKYADYFRKIATRNEDGKLTISRANVG

SEQ ID NO: 106450 - protein, 93 aa, Unknown
  Obtained from environmental sample
  DOMAIN (17)...(69): Clp amino terminal domain
  misc_feature (1)..(93): Xaa is any amino acid
MFDGLTPKAQKIINLLAQEEAKRLNHDRLLPEHILLGLLRQGDGIAIDVLKGIGINIDEVRRELEGALREGGEVLIFGEVAPSPRIEKILRYS

SEQ ID NO: 106451 - protein, 238 aa, Unknown
  Obtained from environmental sample
  misc_feature (1)..(238): Xaa is any amino acid
MEKPYDIFICYKEATDGGTRTKDSALAQDVYYQLVNEGYNVFFSRITLEDKLGQEYEPYIFAALNSAKVMLVIGTKAEHFNAVWVKNEWSRFLALMKSDCNRLLIPCYQDIDPYDLPSELSMLQCQDMSKIGFLQDLVRGIKKVLDKSNANAAVAAPVQPAAPQTDTLLKRAFNLLEDGDPKKADQLLEQVLNFDPENAQAYFIKAFINIEAKPLGPLSLHGFKVLRENLYYQKAWRY

SEQ ID NO: 106452 - protein, 251 aa, Unknown
  Obtained from environmental sample
  DOMAIN (122)...(244): Protein of unknown function DUF115
  misc_feature (1)..(251): Xaa is any amino acid
LGLGGGFAPQAALELTNSNIVVIDFDKDGIAELFANGDYSKLLNNNKVSILIDLSEEEIKSFVIENFAPALCGGIKTFPLRTRIEQDKLKFEKASAAIQQAIDVVSGDYSVQSHFGLRWFSNIIRNIKNTQTESFFAEKKETPILKAAIVAAGPSLDTQLSSLAEFKSHNGFIICADTALGVLLHNNIEADAVVSIDCQHISYYHFMGVNLHGKKIPLILDIASPPLLCGLSSFTPVFFSGGHPLTRYISA

SEQ ID NO: 106453 - protein, 60 aa, Unknown
  Obtained from environmental sample
  misc_feature (1)..(60): Xaa is any amino acid
IIGAIVAIYGLVTPAEMYARSLGINVNLWWGIVMFIFGASMLALAMASRRKAANESKVSA

SEQ ID NO: 106454 - protein, 203 aa, Unknown
  Obtained from environmental sample
  DOMAIN (113)...(181): GHMP kinases N terminal domain
  misc_feature (1)..(203): Xaa is any amino acid
MAGSTIIDQVGRAFAQKRGAAQILVRAPGRVNLIGEHTDYNEGFVLPTAIDRAIYIAMAPSKSKKFQWTALDMGQSFESSVDSLSSSKLHWPDYLQGVLAELKAMGIDAPPVDATFGGDIPVGSGLSSSAALTTGFAFGLNELFNLGLDRVALAKLGQSAENNFVGMKCGIMDQFASLLSRANSLIQLDCRSLSYTYVPFGRS

SEQ ID NO: 106455 - protein, 255 aa, Unknown
  Obtained from environmental sample
  misc_feature (1)..(255): Xaa is any amino acid
YEIEGDKSIAIPRWIGELANLEYLYLGRWVTKIPENVRSLKNLRQIEIWGSKIKTLPKSFGEISSLKELSIDCCGHLRKLPESFCNLASLEKLELSGHTLYGAKFKKLPDSFGNLKSLRKLSLNSLQCLETLPDSFGNLSSLERLSTYECFSRLPESFGNLSSLYDLSISSSMIRHLPESFGNLSALEKFDLTNTEIETLPESFGNLSKLKTFHTYRGHLTRLPKSFGNLSSLEHIDFGNSQTVFLPESFGNLKS

SEQ ID NO: 106456 - protein, 266 aa, Unknown
  Obtained from environmental sample
  misc_feature (1)..(266): Xaa is any amino acid
GSRDAWAIGVNEQWTIGVWVGNFAGGSVANLSGSATAAPLLFSLFNNLSDNKKRMWSEFPRDADFEEIEICTLSGYKAKDFCPHKKNILLPINRMQSRTCSFHKEIIISKSTGFEVCSLCWNAEDTLHIVEEHYSPSVRNELRKTGREPKAETLHNPSCLAKKEGIQFSIVYPENGARLFLPSSDALSEMGFIAIAAHKQRDAELQWFLNGNFLGTTKSEHKMAVTVGSGEHRIGVQDTLGIYLETRSQGASIEFLNIFSILHLDK

SEQ ID NO: 106457 - protein, 132 aa, Unknown
  Obtained from environmental sample
  misc_feature (1)..(132): Xaa is any amino acid
SGGIKFYNDSAATIPEAAAAALSAFEKPPVLVTGGTDKELDFTPLVLAAGKAKAIILLAGTGSEKIKTLLDSGGVKYIGPFDSLDAAISAAAEAASPGDAVVLSPGCASFGMFLNEFDRGRKWKEGVKRLFT

SEQ ID NO: 106458 - protein, 110 aa, Unknown
  Obtained from environmental sample
  misc_feature (1)..(110): Xaa is any amino acid
WVWSFFGCGSLASVTIGNSVASIGDMAFWSCSSLTSIIIPDSVTSIGSSIFQACDGLTTVKFEGTISSDGLDSNAFFGMGDLRAKYLAGGIGTYTRPNTGNGYGATWSKQ

SEQ ID NO: 106459 - protein, 71 aa, Unknown
  Obtained from environmental sample
  misc_feature (1)..(71): Xaa is any amino acid
MKIRNIAIIAHVDHGKTTLVDAMLKQAGTFRENEKVAECVMDSGDLERERGITISAKPTSVMWRDYKINIV

SEQ ID NO: 106460 - protein, 249 aa, Unknown
  Obtained from environmental sample
  DOMAIN (78)...(166): Elongation factor G C-terminus
  misc_feature (1)..(249): Xaa is any amino acid
TSPLAGKSGGKKLTGRMIGDRLFKEAETNIALKVTRSNANDSFEVSGRGELQLGILIETMRREGFELSVARPHVVMVDGKEPIEDVVIDVDDEYSGRVVEKMTKRKGIIVEMKPSGVGKTRIVFSAPSRGLIGYLSEFITDTRGTGVMNRVFASYGDWRGEIDAYRPGVLISMENGLAASYALNNLEARGTLFIGPQAEVYNGMIIGEHTKENDLEVNPVKGKELTNMRTTLSDEKIFLAPPRKMSLEE

SEQ ID NO: 106461 - protein, 222 aa, Unknown
  Obtained from environmental sample
  misc_feature (1)..(222): Xaa is any amino acid
MAVLPLHRTFSVVNGSPWGDRNMGPYFDRGSKIYSIALQDGLTFPFQTKTELDAAAAPEPRQERGPGGPGASGGQGGPGARGGGDGQDSREPREVKLPAIQFNGLASRVYELPLPASNYQNLSVDARRLYFMERDGGGSTGGRGGQGGGGGIALKVLEINNNEPRPEVFLADAGSYTLSLDGKKIMLTRRSGGAGGPRAGGPSGGADYYIVDAGARAPQDLT

SEQ ID NO: 106462 - protein, 137 aa, Unknown
  Obtained from environmental sample
  misc_feature (1)..(137): Xaa is any amino acid
MYCIGTMSGIHILADDLTGANDTAIQFVKQGFSSLVIINADSVNADLLGSYTVISVNCDSRRLNADEAYSAVYKIAKHFRAAGFVYKKVDSVLRGNPGQELSAVMDALDIPLSLAAPSFPANRSVIENGGFQTEPTR

SEQ ID NO: 106463 - protein, 167 aa, Unknown
  Obtained from environmental sample
  misc_feature (1)..(167): Xaa is any amino acid
MLAGIVRAGGDSLSSTIFFVVGIISNIFLDILFVTVFHWGVPGAAAASVFSQFISCVLILFFMFRHFGRFLPQRQDWLAGRRDFGVHLSLGMAMGLQQSIVEAGNVLVQAAINGFGALTVAAVSAAQRVRGLNMMPCFALSRAMTTYTAQNYGAGKMDRVSKGFPGL

SEQ ID NO: 106464 - protein, 73 aa, Unknown
  Obtained from environmental sample
  DOMAIN (18)...(73): Transposase IS200 like
  misc_feature (1)..(73): Xaa is any amino acid
MDNQSLSHTKRNCIYHIVFIPKYRRKVMYGGLRKEIREIIRQLCSYKRIEMLQGSISADHVHICVKIPPKISV

SEQ ID NO: 106465 - protein, 270 aa, Unknown
  Obtained from environmental sample
  DOMAIN (75)...(144): HAMP domain
  misc_feature (1)..(270): Xaa is any amino acid
IPNGDLSASLSTDRMSDVSGEDWYKTVSSGNGFAWLNIDSRQYYAGYKNENGNTVVALVPEHDYHRERNLLLRDSIMFLLITVVIITFVIYLVVGGLLRRVNNLVKGIGKIAGGNLDARIEGHYNDEFDIIKDAVNSMAADIKTHMEEKLQTERKLAESRISIMLSQIQPHFLYNALAVISRLCDKDPAKAKKATINFSTYLRANMNLLERTEPIPFENELNHTISFLNLEKAMFGEALNIIYDVQEKYFRLPALTMQPIVENAVQHGIG

SEQ ID NO: 106466 - protein, 254 aa, Unknown
  Obtained from environmental sample
  misc_feature (1)..(254): Xaa is any amino acid
THINAIKEGQRLGAPYTYACPLGFIFWTSAIFFNGRFAGSFLGGGLPKEESQRIKALTELMFICAQSISIGNDGINKDAKRRILHYSLLSEKIEEIKTQYSQSNLHPEYPMDKERMFLDALSGGDNESAKQILNEILALLIFANPNQFKYIQYRALELAVLISRIGSNFSFTMNAMLENGNLYTKLIQETKNAEELAGAMYRIVDDMAEQIHGLQGIQHVSVLKKAEDFILENLSRKISLKEISKAAGFSSPYF

SEQ ID NO: 106467 - protein, 239 aa, Unknown
  Obtained from environmental sample
  misc_feature (1)..(239): Xaa is any amino acid
MRYYGCDTNHVLGENEAAKKLADEGIHLEDAQKRARAALATRVKVRGFQAVAEEVAYTWFNRLAAIRFMEINDYLPSGIRMLSSDDLNRLEPECIHEWRRIDFIEKDKAEKAKAQGDEALYRYILVKQCNELGKLIPGMFSAITDYAELLLPDRLFVKDGIVYDLIHSGITEADFTEQVEIIGWLYQYYISEKKDEVFAALKKNVKITKENIPAATQLFTPDWIVRYMVENSLGRLWLE

SEQ ID NO: 106468 - protein, 71 aa, Unknown
  Obtained from environmental sample
  misc_feature (1)..(71): Xaa is any amino acid
MKKVVVTGMGLVSPIGKSVEEFCESLKAGKSGIGPITAFDTTGFDVTIAGEVKDFDPSVGWTKKKPAKWPA

SEQ ID NO: 106469 - protein, 275 aa, Unknown
  Obtained from environmental sample
  DOMAIN (24)...(179): Protein of unknown function DUF115
  misc_feature (1)..(275): Xaa is any amino acid
GFGKRWVRNLSRNKGAIRDYPGISRLENLAAKNGASSAVPVFLAAAGPSLDKISFLLGEIHKRCIVVAVDTNLRFFVKNGTPPDFVLTVDPQFWNSRHLDRCVSERTVLIAEPAVYPSVLNLPFKRIFLCGSLFPFGAFLEKHVDQKGRLGAGGSVATTAWDFARSLGAQEIWIAGLDLAFPCLKTHFRGARFEEISNSNSVRFKPVESWVSSALRDGGPFFARSSSGGQVLTDRRLSLYAAWFENQFSKYPQVRNFGIFQEGLAMTGLNLPMTN

SEQ ID NO: 106470 - protein, 243 aa, Unknown
  Obtained from environmental sample
  DOMAIN (21)...(203): DNA / pantothenate metabolism flavoprotein
  misc_feature (1)..(243): Xaa is any amino acid
ADVEDIFDAIVSLGGKPLAALTGKRVLVTAGPTREDLDPVRTLTNRSTGRMGIEMARAFRDAGANVSLVLGGELPAPWGVSTTRVRSASDMLDACLSLWPNMDGVCAAAAVADQRPEQCKPQKAKKGNAPETLTLVRTPDILLELGKTKGNRWMLGFAAESENLLENAAEKISNKGLDAILVNDVSWGGAFGEGDNALTPMTKSGAAKTIGPLPKDKLAAEAVKWFAGHWKTRMYFQAIFLRA

SEQ ID NO: 106471 - protein, 116 aa, Unknown
  Obtained from environmental sample
  misc_feature (1)..(116): Xaa is any amino acid
LVLSYTTSPGYHLEYENTERFKAAIFTDGHAMQIEAAGLLKAAKNKKNAKAFLDFMISPDFQNIIPLTNWMYPVIDIPLPDSFRVNPKSGKSLLPTPVTEDELNEWANLMTNIGKK

SEQ ID NO: 106472 - protein, 209 aa, Unknown
  Obtained from environmental sample
  DOMAIN (1)...(23): 4Fe-4S binding domain
  misc_feature (1)..(209): Xaa is any amino acid
MIIVNNCKSCGICVKNCPVGALCLEDEPGGGNEKKKLKIADSCVQCGICIRVCPAKALSKTDEKPKSAVICSNCPIQCRISADATGACKRYINKDHKLHRTMEHALEPKSLNFPEEKIRRPIITAVGGGSNYPCSLPAPHIVRETRDGVDVVTVVTEAPLSYSGVTVKLDTNTYIGEEGDKVYRDGKVIGMVNTEEYGSKMIAIGGANR

SEQ ID NO: 106473 - protein, 49 aa, Unknown
  Obtained from environmental sample
  misc_feature (1)..(49): Xaa is any amino acid
MTAPLGSVAKDALGAFACGDIPGISHVIINGAVKVNKSRNTPPPARAAK

SEQ ID NO: 106474 - protein, 108 aa, Unknown
  Obtained from environmental sample
  DOMAIN (2)...(69): Acetyltransferase (GNAT) family
  misc_feature (1)..(108): Xaa is any amino acid
RFSAIFDEFHDGICEIMVLESVAQKIGIASALIEKAKQAAQSNGVSKIIVQTSNDNTHAFRFYQRRGFTIREIRLGAMEAARRLKPSIPLIGENGIPLRDEIEFEIDV

SEQ ID NO: 106475 - protein, 226 aa, Unknown
  Obtained from environmental sample
  misc_feature (1)..(226): Xaa is any amino acid
WKRKTQYRAGDYGAALLSFEDARRNRQAMYEQMERDLIALLSVNEVRRIGDSLEKVEKYSKDRFYNRAYAALQELYYRVPKASLNNSASAALEAVGKLKDYPEAEYWIGEVYRVEGELPLALSQFRKAYTMRDLFENPGFGIELQYKIAGILLTRQEYLEMIKVLDSVIGEYDALWINAQQGDALITQNVSSENKTTIPYAQASASFASQAMSRTMETEGIDRFLE

SEQ ID NO: 106476 - protein, 272 aa, Unknown
  Obtained from environmental sample
  misc_feature (1)..(272): Xaa is any amino acid
VVKKKLSTATPPPAQGAPSVPVKRVLPKAVPARSQEGDDFEASSAFAGANAVTKGKTESKEGRAHTKEKTTTPGNEAGKEGTVSDSPAFTIAQRPVAAAGRVGGKYVGPRPAHEENVRGTNQGQRPSGGTGRPGTRPAGRSPGENRSGGLGQNRPYTARPQGSRPQGGTHQGGFGQQRPSGGPQRGLTRPGGTRPGGFTPSQGTPPPATEGPSKKAFKAKKPVYTRKEKELEMEEKLLQTKKKITQVANPVPKTIEIMEVISVSELARKMNL

SEQ ID NO: 106477 - protein, 268 aa, Unknown
  Obtained from environmental sample
  misc_feature (1)..(268): Xaa is any amino acid
YHQLAVQLQGKEAHLKDQLEQVLIKPLDQYRIIGESREIPSLFWTHLCGLIKSDIKKKKEKLPTDIAVFQSAHVIEVVNGYFRSVAAKRREVEAAFKTLESQLAKPPYLYTMDEILKFSGPGGGLLLGQYTSEELSEWMKRQITECEDNELPALLIIKVKNRNEQYFLLKEKMIPLCARLLHDGKILVRMAIIKQWSRLISNYENELAMTSDAEFEKLLAKTAEKLCPELMSLLSDPKLLLIYHEINRKENGIPAAMRIIHEGKLLPY

SEQ ID NO: 106478 - protein, 177 aa, Unknown
  Obtained from environmental sample
  misc_feature (1)..(177): Xaa is any amino acid
MTPRGYLSIVLHAHLPFVRHPETNYMMEENWLYEAATETYIPLLTYFDNLLSDAVPFRAAMVLTPTLCAMLSDDLLRNRYAAHISRLIELADKEVRRTRHDKAMNRSARMYLERFRLCKYTFEEKYGRDLIAGFRKLQDAGVLEIMTCAATHAYLPNMQSNANAVRAQVEVAVQSYH

SEQ ID NO: 106479 - protein, 160 aa, Unknown
  Obtained from environmental sample
  DOMAIN (1)...(144): Glycosyl hydrolases family 11
  misc_feature (1)..(160): Xaa is any amino acid
GRGTGGSYSYIGIYGWARNPNAAKEEERLIEYYIVDDWFGNQWQPDTSPIPLSTTGGSLLDFIAADGALYNVVKNVRTQKPSIDGTRTFTQYFSIRQTPRRSGTISITEHFKQWEKMGLILGNLYEVKFLVEAGGGTGWLEFSNLKLTQEEKPRAMSNEQ

SEQ ID NO: 106480 - protein, 239 aa, Unknown
  Obtained from environmental sample
  DOMAIN (128)...(195): Elongation factor Tu domain 2
  misc_feature (1)..(239): Xaa is any amino acid
MKETAPPPDLVKDLEAERAALVETVAENDDEVMEDYLEGREISEERLKAAIRRATLGLKLVPVFCGAALRNKGVQPLLDGIVDYLPAPTDMPPLVARDTQGAPLTVEFREKAPLAALVFKIQMVDQGRKMSYLRLYSGRLAEGDEVLNPRTGQKDKIGRILRIHAGKRDRVGEARAGELVGVMGLRSAGTGDTICAPDRPVLLESIRAAAPVISIALEPDNSGDLDKLAEALNKLTEED

SEQ ID NO: 106481 - protein, 196 aa, Unknown
  Obtained from environmental sample
  DOMAIN (1)...(196): Phosphorylase family 2
  misc_feature (1)..(196): Xaa is any amino acid
MIGIIGGSGLDNPEIFHESRDENISTVYGEPSSALRHGLIDGIKIVLLARHGREHTIPPSQVNYRANISALKKAGCSHIIATTAVGSLKEEIHRGDLVIIDQFIDFTKQRKMTFHESFEPGNPVHTPMADPYDSRLRKILIDECKALNYQFHEKGTVITIEGPRFSTRAESFMFRSWGADIINMSIATETVLANEA

SEQ ID NO: 106482 - protein, 273 aa, Unknown
  Obtained from environmental sample
  misc_feature (1)..(273): Xaa is any amino acid
GIAIDTVATEGLNAGVYKTSYSRVKISGGTVSVENGRAVNNRGNVPAIGDDEQPSVTISGGTVSAEDGVAVYNILDGWIVIKGTETKVTSKNTNSSQGTVFLESVEIDKTDAEKLNTPLLSVRGGTVENTADEFAYKGNAIYNASNGKIEIKGFPATEAEEEAAEEEAETYPIVKATSGSAVFNKNGGYLDILKGATVQVTSGTAVNNITGDADDLANSSGLNRPEGIVYISDIAPEDDVDDEVYFNAEHRTRVTATTGTAVYTGGKGPVGAA

SEQ ID NO: 106483 - protein, 75 aa, Unknown
  Obtained from environmental sample
  misc_feature (1)..(75): Xaa is any amino acid
MKKHLFFLSILAACYGCDSKHTRLIDFVNPMIGTDASGHTYPGATVPFGMVQLSPDTKLSGWEVCSGYHYEHDTM

SEQ ID NO: 106484 - protein, 230 aa, Unknown
  Obtained from environmental sample
  DOMAIN (1)...(17): KWG Leptospira
  misc_feature (1)..(230): Xaa is any amino acid
KCGYIDKNNNVVIPYQYDHAKEFIEGMAMVKLNEKWGYINSSGKIILPITYTEKEAKQQRQECNTFSFFTRNYVETKINEWQKKGEFEKTTEWQQRVNEISRNEKKDKLIKEAETAYITENTKKMLIFDLGEYSADDEVFEITSNLYGKLYVPVPQNEAKIFKSNWNSLNKTPKYFIENDKIALAEVTFNTADNKTYKYRNDASVNYTKVQIDYKFDPIEINVAKSSQST

SEQ ID NO: 106485 - protein, 257 aa, Unknown
  Obtained from environmental sample
  misc_feature (1)..(257): Xaa is any amino acid
VSSGGPSGKALGLYATYKDLAFDYTVKSVTLKAQWTADISAKTFTVNYNTDGGSPGFPSKTVKFNDANLLPASNPTRKGYNFKGWDVTLGGYGYNVTNSNPYSSLATSENSTAITLKAQWTLASAAAPVPAASSNVTVSFNTSGGTPSPASRNVTVDSLYDALPTVTRSGYNFDGWFTAASGGTKVESSTKVTNKSAHTLYAHWTAASGITVTFDSKDGSTPNPASKSVTFDSTYGSLPTVTRDGYKFEGWFTAASG

SEQ ID NO: 106486 - protein, 262 aa, Unknown
  Obtained from environmental sample
  misc_feature (1)..(262): Xaa is any amino acid
AVAAGAPEGVIAWIDVPSLDLTRAVMAEADLILATGGPGMVKSAYMSGKPAIGVGAGNTPAIIDDSADILLAVSSIILSKTFDNGMICASEQSVIVLDAIYQQVKQEFIRRGCYFLKEDEIEKVRKTIIVNGALNAHIVGQPAFKIAETAGVNVPETTKILIGEVESVELSEEFAHEKLSPVLGMYHAPDFAGAMEKAVKLVADGGYGHTSSLYVNAVTGKEKIQQFQDHMKTGRILVNTPSSQGGIGDLYNFKLAPSLTLG

SEQ ID NO: 106487 - protein, 213 aa, Unknown
  Obtained from environmental sample
  DOMAIN (3)...(140): AIR synthase related protein, N-terminal domain
  misc_feature (1)..(213): Xaa is any amino acid
MPTPSSENAILACIDRHFATRHPSLLLARGDDCAVLRPSGPLCLSTDLFLEDVHFRRSYFTPQEIGHKALAVNASDLAACGAKPLAFTLSLGLPPDVGMDILEGLFAGMSALAERLHMGLAGGDLSRSDKLCLSITAWGEGGGQAGSGRQWLSRGGAQPGEALFLLGDMGLARTGLALLESQSKTALAEWPATCAAHLTPQPQVDAGQILVRL

SEQ ID NO: 106488 - protein, 287 aa, Unknown
  Obtained from environmental sample
  misc_feature (1)..(287): Xaa is any amino acid
VPHGGGFYEDATLHGVAGVAGLDKLSFDGWDRGTEVTEESRGTPESPGGGFGLEGNSYDPGGMFIQSGIYEDWRPRQHEGGNDAAPLPGRLDFSFNPTGSTVVDAIHLSGFDAGTIIVIGTPQFDAHGNLTNGVTVSGPGQTFDFTRSNFDSDGVYVLPPKNSDHDMDIHATLDVHAASSGVHDSLSGSFTIVVDAVADKPVVEEVATEYGVTRQDDAGHGKDGEARDVAVNIQATFGDVLDGSETHYFDIADIPSDWTLSGVLPEGWTLTATTDNGDGTYTLRIDV

SEQ ID NO: 106489 - protein, 230 aa, Unknown
  Obtained from environmental sample
  DOMAIN (1)...(215): C-5 cytosine-specific DNA methylase
  misc_feature (1)..(230): Xaa is any amino acid
MKGFNDIRGTLFFDIARILFEKRPQAFVLENVKLLVGHNKGKTMRKIMETLKELNYNVSFKVLNAINFGLPQKRERVFIVGFKNNLNFEWPNKNTKMKTLDEILEKKVDKKYYASKEIINKRLAMKDKPNETTIWHENIAGNIGIYPYSCALRAGASYNYLLVNGERRLTEREMLRLQGFPEEFKIVCNYTQTRKQAGNSLPVPVASSVLTNLLSALNNENVYTNCIIDS

SEQ ID NO: 106490 - protein, 141 aa, Unknown
  Obtained from environmental sample
  misc_feature (1)..(141): Xaa is any amino acid
KAFRAFIDTIHIAIKIYGFGGIINLDGFMIAIKSGEVMYCGVEFSDGGRIYHYRTTDLRINVGDVVIVPVGEDNREQEATVKTVDYCRWDDTPYPLEKTKQIVRMADGKNDKMPFLRFSPKTPLLRSPYESTIDYEVEETE

SEQ ID NO: 106491 - protein, 257 aa, Unknown
  Obtained from environmental sample
  DOMAIN (133)...(160): NHL repeat
  misc_feature (1)..(257): Xaa is any amino acid
MVVGNRIETVANRRTLLPTADDDVRYIESGRYPGHYENNIFYRQPTSVLPHDDGSAWVVAYGSNEIVRIDVNGIIKDRKRGPLNGFDRPYDLVRGAGGRMYVTEYRGGRVSVLSPQGDWQGYIGSKGIGQGMFVGPQNIAADEDGYIYVVDFGNQRISKFDPDGLFVLSFGRKGAFFPGFLSPTGIAARNSRIFIADSVAKKIYIFDPNGNYLGVLVEGLTGPESLRFLSDGKLLVADTNRILLVDPDTAIIRELGL

SEQ ID NO: 106492 - protein, 87 aa, Unknown
  Obtained from environmental sample
  misc_feature (1)..(87): Xaa is any amino acid
MAVLMNRWMPEMDGIEAVRLIRNEIGTEYARNIPIIALTVNAVTGNNAFFLKAGFQGVLSKPIGIMKLDEVIRRWVAGENAKTISAA

SEQ ID NO: 106493 - protein, 151 aa, Unknown
  Obtained from environmental sample
  DOMAIN (12)...(70): 2Fe-2S iron-sulfur cluster binding domain
  misc_feature (1)..(151): Xaa is any amino acid
VTAENTPKAVFFTVNGERVSGRADVKLLDFLRDDLRLTAAKNGCGSGACGACTVLADGKPLRSCVTPLGKIEGKNIATLEGLSRREKDVYAFAFAEAGAVQCGFCIPGMVLSAKVLIDRNNNPDKNAIRAAIRPNICRCTGYKKIVEAVLI

SEQ ID NO: 106494 - protein, 283 aa, Unknown
  Obtained from environmental sample
  DOMAIN (207)...(244): RHS Repeat
  misc_feature (1)..(283): Xaa is any amino acid
ERTVTTSAGTSAYRIDAFGQVTEVRNALGETSTRTVNGVGNPVREQGASGGYYAYRYDASGRPVEAGREGEKAVSVRYNRDGSVAEKTDREGNVTRYAYDGRGLLTRETTALGEIRYYYDVGGRVTRQEAASRNSVTYNTEWKYDEAQRTVTITAGGTYSVSVYLNAWGEVVRRVDGEGNEEKYEYDGAGKLVKSIDGYGRITGYEWNEIGKVRKITNTDKTVEEYEYDHIGNVVETRDALGTSWKGTYDEAGRLVKESGRPGIEKEYKYDQIGRIIEVRSGG

SEQ ID NO: 106495 - protein, 214 aa, Unknown
  Obtained from environmental sample
  DOMAIN (27)...(170): Bacterial flagellin N-terminus
  misc_feature (1)..(214): Xaa is any amino acid
MIINHNMSALYADRQLGVTQVEMSKDVEKLSSGLRINRAGDDASGLAVSEKMRSQIRGLHQAERNIQNGVSFIQATEGYLQETQDILHRLRELAVQSANGIYTDEDRMMIQVEVSQMVDEVNRVASHAQFNGMNVLTGAFAMNSPSGRIMQLQVGANMDQNSKIYVGDMSASALGLIDSQGSEGKLSIANPEAANLAIGTVDNALKIVSKQRAD

SEQ ID NO: 106496 - protein, 261 aa, Unknown
  Obtained from environmental sample
  misc_feature (1)..(261): Xaa is any amino acid
MRIEAGNYSFSVGNEEISLNFRGGTLKDFVDALNRRSKDKISASLLAVQSGTKSLLIESKVTGAQNRLTFSGDSVDFALKIGMMERDNSAQTSGFIGTPAVQKGAEINDGVLKMPPLSSASMPLNISINSNSLLMLKFDTSTRIETDPNFGIPKPPPGPSVPSSSVTYGGITIKNEPSLAPLPEWKVPAEPQRHDDMAVLSLVFSDGSSAKLPPITDSTNFTSRQYFLSEIAQGRTITSLNIENTNTHREITISNEKYLIP

SEQ ID NO: 106497 - protein, 257 aa, Unknown
  Obtained from environmental sample
  DOMAIN (1)...(257): Bacterial DNA polymerase III alpha subunit
  misc_feature (1)..(257): Xaa is any amino acid
DVARTLSISIDEAEKIAKLIPFRPGITLKQAFKEEPRLQEMEADPRYSELFVLARKLEGLNRHSSLHAAGVVIGKSALYNLAPIFKDTKTGAIATQYDMNHLETCGLVKMDFLGLKTLDVIKHTEEIIRRRGGDYANFKVENAPENDEATFRMLGEGQSFEIFQFESDGMRNILKQVKPDKIEDLIALNALYRPGPMDNIPQFIDSKNGRQAIHYPDPCLEEILKETYGVIVYQEQVMQVARIIAGYSLGQADILRR

SEQ ID NO: 106498 - protein, 239 aa, Unknown
  Obtained from environmental sample
  DOMAIN (8)...(224): N-acetylmuramoyl-L-alanine amidase
  misc_feature (1)..(239): Xaa is any amino acid
SNYRIAAIIIDAGHGGKDPGAIGKVNINGKMQDIVEKDITLNASKILRDMLAKAYPDKRVLMTRESDITMSLEERPLIANAVPIRKNEAIIYISIHANYVSDQRVRGFEVWHLPPEYRRTVLDDSYFSDSPELRKIMNTLTEEAFLAESIRIAQSILDSMKTAMGGSMPSRGLKAEEWFVVRRSIMPAVLVELGFVSNKDDALLMTTDRDLRRMVEAVYKGIADFITVFERSGGFIASR

SEQ ID NO: 106499 - protein, 161 aa, Unknown
  Obtained from environmental sample
  misc_feature (1)..(161): Xaa is any amino acid
MFVFLLLLIDLFSNLIRYLNNEVPITTILKISLFFVPKSVSYAMPMSLLFAAAYTLGDLYSRNELTSVFATGIPLWRFSMSFVAVGLAASIFSFYLDDRIVIPTLKQKNELSRLALKQYVTKSNSDIVIKSRNGRIIYSVDYFDSEKNILNGVNVVEMNEK

SEQ ID NO: 106500 - protein, 246 aa, Unknown
  Obtained from environmental sample
  misc_feature (1)..(246): Xaa is any amino acid
VDDTLIAEVRNRPVSKDECTEWIDGRGKILMPGLVNCHCHGDMTLARGLGDDMTLREQIETFRSHNWFYEYITDDDRYYARQLAYCEALLAGVTFICENTYWSLGNRAIQAMKETGIKGALVEDIRLNFVDSDSFISASALQEFSTACRENGLVPVIGLLAEEDYETARLRKVFEKARGIDALQTLHLAENQWRRDLIQKKYDMTPIEYLARNGFLHNKLIGSHVVYADENEINLLKESKVKVANT

SEQ ID NO: 106501 - protein, 81 aa, Unknown
  Obtained from environmental sample
  misc_feature (1)..(81): Xaa is any amino acid
ADLAAAKVTNIEMETSAQFVIGKLHGMRMGAILSVISNRVLDRWGDNGGEDKACLAACEAIRILTEWDRTGEIQVNIKTKK

SEQ ID NO: 106502 - protein, 251 aa, Unknown
  Obtained from environmental sample
  misc_feature (1)..(251): Xaa is any amino acid
GAGSGSGFPHRYTKREDIEIAAFLAATMAWGRRDLILRSARRMFALMEDSPFAYIMSGSYRKLKDRNIHRTFFEGDLKYFCRGFNACYAKYGTLEKLFASAADIWEGIALFREEMAAANKGRYSGHIANPGAGTGSACKRSNLALRWLVRKKPVDLGLWKSIRASALYIPLDIHVARTARRLGLLKRKSNDKKAVVELTEKLKAFCREDPVKYDFALFGMGLSANLSASQTSASQTSASRTSASRTNPMPI

SEQ ID NO: 106503 - protein, 266 aa, Unknown
  Obtained from environmental sample
  DOMAIN (34)...(199): Glycosyl transferase family 4
  misc_feature (1)..(266): Xaa is any amino acid
IFPGWAVSASASAFILVAAVISFTFGKFELSLRFLPCLAALIITLISGACDDFRPMSPRYKLLLQILSAFCVIIPGFVFKRLTYIEDGIFSALPPLGIFITLLWIVGLTNAINFIDGIDGLAGGLSALISLSFGIIFFSFSQTPQTVLFCVSLFGVTLGFLAFNAPVPRAKIFMGDGGSQFLGFSLALLPLLEGNNSPADQPLPLPVLYAAALLAIPIFDMIAAVWRRKREHRRIDNPDKSHMHHKLINLGLSARGVNAVLYALQI

SEQ ID NO: 106504 - protein, 226 aa, Unknown
  Obtained from environmental sample
  misc_feature (1)..(226): Xaa is any amino acid
ERIYKLHPALRSCLVRLHPAEEADKRAFAGFMGSFADTYTRKELHEQRGVFSLFGANFYRALSLARELDTRDDVLFLNLALASYAYNVRNFTEAERLYKELAEVARNYNITEYEACAYHELGMVVEKRWDFDAAEDWYKQALAIYQKQGNENGMANTYHQLGNLAQERRDLAAAEDWYKQALAIYQKQGNENGMANTYHQLGIVAQERGDLNAAEDWYKRSLAINQ

SEQ ID NO: 106505 - protein, 235 aa, Unknown
  Obtained from environmental sample
  misc_feature (1)..(235): Xaa is any amino acid
MGTGIVVTSDSMAKRCTLNGDVKLRSGEIFYLERNFYIREGTLYFKENEADFDPKISARAEIRDLADIGQVTISMIIDEAPLRSFSPRFVSTPPLSQLEIYSLLGQAPQGDGDQRNLAASVAMDSLAQFTVINRLQRQVRDYLGLDMLSMRTQLLQNVVVQAAGAAGNQLTGNASDRPYRLGNYFDNTTVFVGKFIGTDLFGEAMFSFKYDENKIDWGGLVLEPELGFELRNPLF

SEQ ID NO: 106506 - protein, 259 aa, Unknown
  Obtained from environmental sample
  misc_feature (1)..(259): Xaa is any amino acid
MNNDMALIQLHHISQRAKSRPLRDNAAEFLQVVAENRGLSQEELADRLVPTLGLDDPQALSFDFGPRQFTVRFDENLNPVIFDQQNVRQKSVPRLRADDDQLKAPEALARLKGLKKDATQVSKNLLPRLETALRTTRRWSLADFHSLFVNHPFTRLVTQRLIWGVYPANEPRCLLKAFRVAAEGEFCNAQDEPIDLPADALIGIAHPLEMTAEMRSEFAQLFADYEIMPPFRQLSRRTVLLTPDESTSNSLTRWEGKSA

SEQ ID NO: 106507 - protein, 272 aa, Unknown
  Obtained from environmental sample
  misc_feature (1)..(272): Xaa is any amino acid
RVIYGPPKPVIDGTDNSNLPEILVSPPWRSKKKMTAPRLDLAPLELTPQVYWQPGEQERLAATEPARYFSTESLAQRMEQKSGRVVLQELGFGDDVWLFLNYILPGKLDAARNSLFVQWHYYQGRVEEILNGWNSPEAQLAEQALRSGHIEALINIWENDNYSHYRPEKSVWNLYLLAQLPREMALTFWLRINEKKHLFAGEDYFLSILGLDALPGLLLAFSHRPKETFPLILNFGATELALPVAHVWRRFAAQRDLARQWILQWPEHTASA

SEQ ID NO: 106508 - protein, 109 aa, Unknown
  Obtained from environmental sample
  misc_feature (1)..(109): Xaa is any amino acid
MKRLFLFPAWIFILSLTIFSGGCRQAKPQKVKGKINVTSVIFPSYDFVRAIAGDRVNLIMLLPPGSESHSYEPTPHDIISIKDSDLFIYPGGENSDWVERILTSISNRS

SEQ ID NO: 106509 - protein, 252 aa, Unknown
  Obtained from environmental sample
  misc_feature (1)..(252): Xaa is any amino acid
VQFDEERLAPTYRLLLGQPGQSRAITIAEKLGMPKSVLDTALKTLGRQEQDWREFLRQLESERGRLLEESDELAKAQAALEKDKRILADREAQLKRQQEKFKEESEQKLARVLDFADHESKRLVKDLKAQQKAAQQANADRVGMEARERVKAIESIAKQELAPVLPKPRPREHGDIAVGAYAKHSGLGVDGRIVSMRGKTAVIETANGRSLEVPVAELEPTSNMPHQEARQAGGRTKVRVEYQAMDDELNLI

SEQ ID NO: 106510 - protein, 97 aa, Unknown
  Obtained from environmental sample
  misc_feature (1)..(97): Xaa is any amino acid
ACLCGRVTTASMDVLPYMKTVGTREAKSYGVNVIGLRRRGFSEETIEALHRAHRILFGMGLLREEAMEKASAELGSIPEVAYLLEFIRSSKRGVIRG

SEQ ID NO: 106511 - protein, 220 aa, Unknown
  Obtained from environmental sample
  DOMAIN (90)...(214): D-isomer specific 2-hydroxyacid dehydrogenase, NAD binding domain
  misc_feature (1)..(220): Xaa is any amino acid
VDTGQDGPARDGADEGTALGAALSDAEILVTAWGFPRLDGHLLARAPKLRLVVHTGASVRFLVSDALFARGIRVSQAGAAMAAPVAEVSLAFTLALLHQVHRFDHALRTGQEWSRAKAARPRHELAGSRIGVIGASRTGRAYLQMINALGARASVHDPYLTGQDAARLGADRVALPELLATSRIVAVHAPAVAETRHLLGRRELALLPDGAGLGTRHGPG

SEQ ID NO: 106512 - protein, 181 aa, Unknown
  Obtained from environmental sample
  DOMAIN (124)...(181): Sigma-70, region 4
  misc_feature (1)..(181): Xaa is any amino acid
MQEEKKHIIAEAIRNGNEEVFKAFFRTEFHNILFFTNKYLNNIFDAQDIAQETFIALWNAREQINPALNIRTYTFTIAKNKALNFLRDTVKNHTGTLEEQEKAINLSALKSTNVSEKIEALELEQLIKRIYSILPEKIKESFILNRQYGLTYEEIARKKGISVKVVEYHIVQALQVSKRKC

SEQ ID NO: 106513 - protein, 245 aa, Unknown
  Obtained from environmental sample
  misc_feature (1)..(245): Xaa is any amino acid
VTYTREYFAAFGHDVLVVRLHASKAGKLNFRVGIDRPQVFETTLQGNELLMRGQLNNGTDGKGMKYHTRVKVKLSGSGNVVGKDNRIEVTRAGEAYIFISSTTDYRDPAFESKCQALLQKAVAERYAAIKSAHQKAYKNYFDRVQLHLKPHPDKDTMPTDRRLAAFAADPADNGLVELYFQFGRYLLISSSRPGLLPPNLQGLWVNTVNTPWNGDYHLNINAQMNHWPAEITNLAELHRPLIQLT

SEQ ID NO: 106514 - protein, 272 aa, Unknown
  Obtained from environmental sample
  misc_feature (1)..(272): Xaa is any amino acid
MENFSNASGAIIELVKNAYDADAKTCITIFQKIEITDESQNTALPQNDKKSQVILQKQKQLLDIVSSKNDRKSQIIPQEQLKLLDNTSSQNDKEPKKDSPKFYYEIYIIDNGSGMTKDILNNQWMTIGTDDKLINFKSDKERIKTGAKGIGRFALNRLGKIAEVYTVPEKQINLDEGYYWKVNWENFDIPGTTINQVMAEFDVIPTLSIKEKLISMFSENKNILDVIKKFSLKQGTIIKITSLNDLWDDDSIDKIYSDLEQLNPPKEQSFSK

SEQ ID NO: 106515 - protein, 277 aa, Unknown
  Obtained from environmental sample
  misc_feature (1)..(277): Xaa is any amino acid
DIKHNALSDALDADGGFIGRFAGFSANPLTIGSLFHFIEDSKITLSDREAILDSFLKNTKKTGLAEHGEGYWSDHWHYNTDLIESYLAVFPDRFNQLLLETCDYTFYDDCYFVEPRRIKYVLFRGTPRQIRAVRRDPEKAALIASRAQNPNAMRTNFGTGGIYYTNLLEKLMCVVANKYASLDPEGLGVEMDADKPNWCDALNGVPGLFGSSSAESLELLRLVSFLKYGLDGIASELNTPLAEEIHDLLVELMRITLKDQDNFTFWDKTHHGKRAIP

SEQ ID NO: 106516 - protein, 193 aa, Unknown
  Obtained from environmental sample
  DOMAIN (1)...(179): Glycosyl hydrolases family 16
  misc_feature (1)..(193): Xaa is any amino acid
NSGGREVTSARIRTAKKGDWLYGKFEICAKVPLGLGTWPAVWMLPTDWKYGGWPASGEIDIMEHVGYNPDALVMSVHTESYNHVKQTQKSKSIKLSGMTDNFHVYAVEWLPDKIKFFYDGKLQFTYNPGALKNNPTYKEWPFDRRFHLLINLAFGGNWGGARGVDYDILPVKYEIDYVRVYQSPEITALANKS

SEQ ID NO: 106517 - protein, 112 aa, Unknown
  Obtained from environmental sample
  DOMAIN (1)...(111): S-Ribosylhomocysteinase (LuxS)
  misc_feature (1)..(112): Xaa is any amino acid
IDQPALHTLEHLGATFLRSRKGWAERVVYFGPMGCRTGFYAIFEGDLDSEVILPLIKEMLEWVIAFEGAIPGASAGECGNWQEQNLEMAKWEARRYAAILEKADKENFVYPA

SEQ ID NO: 106518 - protein, 281 aa, Unknown
  Obtained from environmental sample
  DOMAIN (243)...(276): Tetratricopeptide repeat
  misc_feature (1)..(281): Xaa is any amino acid
MRLGLIYAKDNNMQTQAVNNLRTASTLVDTIPVIWKTLGDVYGKQKNVDGEFAAYSKYLALKPDDIAASKRVGAIQIERKQYAAGVANLEKVAAAKPDDYEVCMLLATGYTNTNKPKEAAAQYKKAKSLKPDNVSIRLSIIEALEKSGDNEGAKEEKASLSELDRKIVASDKKNVEARQRLVTYYRANNDNARAYTHLNELAELTPKDPVVFKSLYDIAMADGKKKEAVGHLKKYIAQKPNMADAYKNLGLLLYEDKDYDGALNAFREARKLDPAVTGIYK

SEQ ID NO: 106519 - protein, 228 aa, Unknown
  Obtained from environmental sample
  DOMAIN (2)...(225): Protein of unknown function (DUF1015)
  misc_feature (1)..(228): Xaa is any amino acid
IEPLTEKRDKLKKLYDFGLNQNGGHIKGYFAGDTDGIIKKLYALLDSDKQIKKYGSGDVNFLFAVGDGNHSLATAKACWEKLKAGGADGNHPARFALVEVVNLYDEALKFEPIHRVVLNAGADFSISEIEKKKLAPAEKISEIQGYIEAYLASHKGAAVDYIHGEEHLNEVVKAEKAAGKTAVGIKMPAIEKTELFPYVVKRGVLPKKAFSMGEAEEKRYYLEAKRIK

SEQ ID NO: 106520 - protein, 195 aa, Unknown
  Obtained from environmental sample
  misc_feature (1)..(195): Xaa is any amino acid
VVSGSLEYGYRNKLQLPVCLGKDGRAKIGFYKKNSHEVVDIESCPLHGDWCGAVIGAARKFIESEGIEPYDEAKHSGLLRHIVARFLGGRLSVMLVLREEKRLKYSKLAGFIEYYLKELKKKQKDTAEIKDFSIYYSVNREITNVIALGPAIKVFGEGPPPLAFSQVNDEVKDKLYNFAAGEVFGFSHIIDAYSG

SEQ ID NO: 106521 - protein, 84 aa, Unknown
  Obtained from environmental sample
  DOMAIN (6)...(77): Glu-tRNAGln amidotransferase C subunit
  misc_feature (1)..(84): Xaa is any amino acid
LARLEFSETEIAGFTAQLATILEYVDQLGAADISGVEPTCFVAPSHDPLRDDVEAPSLPAESLLSNGPSVKKGHFAVPKVIGGT

SEQ ID NO: 106522 - protein, 242 aa, Unknown
  Obtained from environmental sample
  misc_feature (1)..(242): Xaa is any amino acid
MNKLETGIAIVLERLKSELAAATWELRRGHYNRMLELARSLGINEACQKLYDAYVADDKGFRNRRKTHVHCVKLLDATEGTNARDEYGKLYNEPSLPSKEETQKYFHGRQYPLAGKAGIDRLIVKAEIEMRYLNLSESTVGQYRHAWTDILNYFNRYNSPDYDERLLQCFIREIGSHRDEGSMKQWKWKINRKAANVLIEVANTGQFHWGRIKPGITCAGMEIENIRSLHLSLLKHRHLSKS

SEQ ID NO: 106523 - protein, 267 aa, Unknown
  Obtained from environmental sample
  misc_feature (1)..(267): Xaa is any amino acid
SAAAMLLAEGCTVPFIARYRKEKTGGLDEVQVRNIEHKIASARNLETRRIEIIRGIFEQGKLTQALFDNIRRAATLAELEDIYLPYKRKKKTRGMMALERGLEPLAAAMRELQAAPLLAKAAEFVRQDAENPDLSVLTVEDALQGAMDIIAEAISQDPENRARVKAFYVKDGFIIVKGSGKAGKGDEEARKTSVYQMYWDYKEAISLIKTHRILAINRGEREGALDVTIDVDENTAARMLQQQYTLHNDYHKTAIEDGLKRLLSPAV

SEQ ID NO: 106524 - protein, 129 aa, Unknown
  Obtained from environmental sample
  DOMAIN (6)...(78): ATP synthase alpha/beta family, beta-barrel domain
  misc_feature (1)..(129): Xaa is any amino acid
MNEGKIIQVIGPVIDVAFPEWQLPKILNALLVTNPAINDQPDNLILEVAQHLGDNVVRAIAMDISDGLVRGMPVKDTGAPISMPVGKEVLGRVLNVVGHPVDGKGPVNASKFYPIHRPAPDFKSQDTSV

SEQ ID NO: 106525 - protein, 86 aa, Unknown
  Obtained from environmental sample
  DOMAIN (5)...(86): Adenylate kinase
  misc_feature (1)..(86): Xaa is any amino acid
VKLIFLGPPGAGKGTLADRAVEFLKLPHISTGAIFRSAIAAQSPLGLKVKAIIDSGKLVDDETTIALVKEYLSKDDVKGGYILDGF

SEQ ID NO: 106526 - protein, 283 aa, Unknown
  Obtained from environmental sample
  DOMAIN (217)...(283): Peptidase family M23
  misc_feature (1)..(283): Xaa is any amino acid
IALAAFTLEDINIKMPEKYVYKLDTETDVERLTMQYAATGITGILPVQISVTETPFPVTETVAEPNAESRGHNDLIIFEWQQYKVKRGDSVSSIAKKFNVSMGAIIASNEIRNARTLQEGAALKIPNIDGIPYQIKKGDSLTKISSSFNVPLEVILDVNDIKSDNIKTGETIFIPGARMNDIDLKLSLGELFIYPLQNKFITSHYGMRKDPISGALNFHTGIDLRANTGTTVIAAMDGVVSVVSENWLYGKHIIISHDNGYKTLYGHLNSYSVNRRQSVSGKK

SEQ ID NO: 106527 - protein, 254 aa, Unknown
  Obtained from environmental sample
  misc_feature (1)..(254): Xaa is any amino acid
TPLFRRHGGIPQVVYEITGHGEGPLSIFGMQDVMERENLILKSLNLLVASIPTDASALIMNNPKRDLAASEVEKLLTYLEQGGRLLVMVNYNIREVSGLNEVLASYGLEFIYGIVHETDLYYVAIDPSTEWPDLSDHEITRPLSDKNKTPVVLAEAMALSLLDTKRRSVEIKPLMTSSASAFLRTDLNDVSIAKAPSDVSGPLILGAAVTDPSWIENNEPQARIVVIGCGYLLDLATLGLDANRDLFMNSLTWL

SEQ ID NO: 106528 - protein, 247 aa, Unknown
  Obtained from environmental sample
  misc_feature (1)..(247): Xaa is any amino acid
DGIGAVIEERKIATVKRDTIAKYVTVKIGNQVWTAQNLNIETGNSWCNGKDSSKCKEYGRLYDWKTAVKICPEGWHLPSDAEWSTLTAAAKNNANNLKSTWGWNSGNATDEYGFSALPGGQRYNDGGFESRGGLGYWWTATAAKDKEYAYSRQISASSAAVKSNDNTRITSGFSVRCVQDSALSATANKYTVKLSNAGTGATGGGNYDSGAVVTVKAGTPPNGQQFKNWIAAGVTISNPNSPTVTFT

SEQ ID NO: 106529 - protein, 109 aa, Unknown
  Obtained from environmental sample
  misc_feature (1)..(109): Xaa is any amino acid
MEKKQIKLTPEERAVLKRFSRTGERNVRLVNRARIILALDTSGGRKAEKQEDIAEHIDVSRQTVNNAKNDFLAIKDVTRFLQRKQRETPPVQSKITRELEARIIALACG

SEQ ID NO: 106530 - protein, 197 aa, Unknown
  Obtained from environmental sample
  DOMAIN (64)...(168): ATP synthase alpha/beta chain, C terminal domain
  misc_feature (1)..(197): Xaa is any amino acid
MTALPIIETQAGDISAYIPTNVISITDGQLFLEADLFNSNVRPAINVGISVSRVGGAAQLKAMKQVSGSLKLDLAQYRELAAFSQFGSDLDKATLAQLNRGQRMVEILKQPQYQPMQVEKQVIIIWTASHGHLDDIPVPELRRFEAELFAYLDVNAPELLRTIKDSGQLPKDEETLKTNVLGFKDQFKASLAASVGA

SEQ ID NO: 106531 - protein, 255 aa, Unknown
  Obtained from environmental sample
  misc_feature (1)..(255): Xaa is any amino acid
SASGDLSIHSAKDIGPISLDADAPLKFGEHCSAFINSDIRKAVQQGASRENITAGIVCSIVANYLNRVVGNRTIGGKIFLQGGVAKNPAVPLAFAMLLDKEILVPPSPELMGCFGVALLSKRKHADGLLEERPVVEGGSPIDDLLNREIGYERVFTCQACENLCPIQVLSIDSASASKSSAPVTASRKYMFGGRCNKYTNMRKQVKDVPVFDYVEKRQKLIFEEYAAPVDDNKKRNFTVGIPRAFSNHTLYPLYS

SEQ ID NO: 106532 - protein, 87 aa, Unknown
  Obtained from environmental sample
  misc_feature (1)..(87): Xaa is any amino acid
MIKIVTIAGSDTSGGAGLEADLKTFEEYGLYGMTAITLIATMDPANNWAHGVFPIEEKTLRAQLETVFKGVGVTAAKSGMFGTFTRL

SEQ ID NO: 106533 - protein, 263 aa, Unknown
  Obtained from environmental sample
  misc_feature (1)..(263): Xaa is any amino acid
SGCDQAVNRAIMAYAVDEPRIYNRYYSDDDFSDVIYNFVLRESYAVKTAGRTAENNAGITNDSIDLFDRPDVAEYTEPEAVIQNEPEAIYEPDRDLLPGDGLDTGYERFMVLRDRDNDPAFPDSPETDDGYSDSYLIWDNETGEYFTDDFGEIITFPDISDAQSFLHMLRQEEFQSGREDEAIDAEYPGTEPDGETMYTEPDEKTPYIEPDSQRQDTTPPLSNLPKPPNFRITDDHLGEGGAKTKFRNNIEAIQTLYRIESEK

SEQ ID NO: 106534 - protein, 113 aa, Unknown
  Obtained from environmental sample
  misc_feature (1)..(113): Xaa is any amino acid
MLKFRRCLLKLSGEALAGSAGHGIDNSTVNWVAQEIANSVKDGAQVALVIGGGNFVRGATASAGGMNRAAGDSIGMLATVMNAIAMQDALEKCGQKAEVMSAIRMEPLCGYFD

SEQ ID NO: 106535 - protein, 272 aa, Unknown
  Obtained from environmental sample
  DOMAIN (132)...(198): His Kinase A (phosphoacceptor) domain
  misc_feature (1)..(272): Xaa is any amino acid
IKNRHAKIIHRIKDDEWRIEGEKEKLVMHTQVSAEGICFFKPDRKVDFHNGLFLQYFNMIAYDSMNIEREMLSDEVFIPVVNFLNSHVNEGCFETRVSRHGNEFSVFANTFADKSFEIILIDITSREKTRRLKQEMTGNIAHELRTPVTSIRGFLEIILSSNLEEEKKQEYLKRAYNQTQILSELIADMSLLTKMDEHAESLKMSKVNINDLLQNIKIASDKNLEEKNIQFNANIPENLLIFGNESLLYSIFRNLTDNVIRHAGENVSINIR

SEQ ID NO: 106536 - protein, 285 aa, Unknown
  Obtained from environmental sample
  misc_feature (1)..(285): Xaa is any amino acid
EAVSPTPTETPAPRKPDGATLSAGSNYTVAVRSDGTAVAVGNSGEGAYDHGECEVSGWRGLAAVAGGGAYTVGLRSDGTAAATGYNEGGECEVGSWRGLVAISVASNGFITLGLRSDGTVLATGGNADQDRDVSDWRDMVAVSAGDSHIVGLRTDGTVAFTGYNGDGQGKVSDWKGIAAVSAGGNHTVGLRTDGTVVATGHNEFGQCDVSDWRDIVAVEAGSFLTLGLRSDGTVVATGTIRPFKHRPCDVSDWRDIVAVSASAYHAVGLRSDGTVLAVGSKRGRP

SEQ ID NO: 106537 - protein, 234 aa, Unknown
  Obtained from environmental sample
  misc_feature (1)..(234): Xaa is any amino acid
MTKLVAEITNQAKIGVDTLTLSIVGESLNKLSKTTASSINILKGLNLYYRENYKLNVRLAVTKDMSAGEATLDNIKRKMHSAMPGSPFYKELVDEIIKEDYTNSGPDLRDTVLNSLKVAETKQKAVKAAVNFKVILLDGIVVIGGASNSIAEIISKLQENQAVLDSRKKSFFEAIKELIRQITNAEPEEVIYTVDCMDVTQGIPVKEKVNFHHLLDELDKKTKILSSFVRGPAY

SEQ ID NO: 106538 - protein, 101 aa, Unknown
  Obtained from environmental sample
  misc_feature (1)..(101): Xaa is any amino acid
MTETTVKPILVKGKYNEALVYAKAIEASCENKIRQYLDHPAFAGTKVRIMPDVHLGKGTVIGWTATYDSLIIPSFLGLDIGCGVCACNLGMGKLSFDKLDK

SEQ ID NO: 106539 - protein, 72 aa, Unknown
  Obtained from environmental sample
  misc_feature (1)..(72): Xaa is any amino acid
MAVIGIIGGSGLDNPDILKNAKDKAVATLYGKPSSPLKHGTINDTEVVLLARHGRQHTITPSNVNYRANISA

SEQ ID NO: 106540 - protein, 266 aa, Unknown
  Obtained from environmental sample
  misc_feature (1)..(266): Xaa is any amino acid
MLLGVFSVLLSATLCLGASLAIGFFKLDPKVHAFAMEYFVIYSAGSVFVALSMILATIIRSYGHSRGPMLVNVVAMAINVCGNYLFIFRGFGDTIRGLAGINVSVIQGVALSTVASQIAAAVILYDMMRHRKDIVLEKGGLFKVPSAVYRRILAVGVPTAGENLSYNLGQIMIMRMVSALGTDAMAAFVYAVTVLRFVFITSISIGSAVQIKVGYYVGAAMSEIAQRKVYRYFLAGTAISTALVLTVKLLQFPIMDTFTHNPEIQT

SEQ ID NO: 106541 - protein, 271 aa, Unknown
  Obtained from environmental sample
  DOMAIN (106)...(223): CBS domain pair
  misc_feature (1)..(271): Xaa is any amino acid
MPPPDVADFVSRLSGTQRTLVVRFLPRSCAASVFSELPPAVQDDVLTDLTNNEIRNLLSDLDPDDRTALMDEMPAAMTRKLLNLLSPQDLKLTRELLGYPEGSVGRIMTPNIVYIKERWTVREAVEHIRTFGRDSETINVVYITDSAGRLIDDITLSKLVMTDPKKEIQEIMDYNFIAIPATESEEKAVEMIKKYNYFALPVVDSAGVILGIVTVDDLMDIADTHATEDFQRIGAISVMPEDGPIEDLKEAPAFLLYRRRIVWLVVLVFVN

SEQ ID NO: 106542 - protein, 264 aa, Unknown
  Obtained from environmental sample
  DOMAIN (133)...(220): Domain of unknown function
  misc_feature (1)..(264): Xaa is any amino acid
ITADYCSGYGQYALVPIYLPSALSNYEYFTFRFRLASGTLGTDMGNKTIDVYASGSASVTSQPNNSVGKTPQASYTASNQSAWTDYIITINLGSAIPNLQGLIYITIGINSSSINYLLDDITFVLKDDAPMPPPSISPTTAAFDKKIAAQADILVTMTPRDKSLTSITNDDTPLTSGTNYTISGNEVTLKKEYLATLDDGTATLTFNFSGGDTATITITISDTTGGATLITSYDFEHGATISIDGYPKAFEGTISGIILESGTG

SEQ ID NO: 106543 - protein, 263 aa, Unknown
  Obtained from environmental sample
  misc_feature (1)..(263): Xaa is any amino acid
MKKYSIIVITLVMLALLGACENPFIKDIVPPAGPGSNANPTVFKVYIDYRGRVSGDSITASPASGKDGEEITLTYNLTNASNTNQIEFSGTYSRISPVESAGTGTRPYRINKNDAVDGEITITADFKHSSKLAGSAVSGAPTVDSKTINSITINAVTISPNPGNQTVEYAISDTPSTPETGWQEGLTFINLDDDTVYYVFARSKENGVYNAGMAQFVEIRTLRAITIDISITGNVTGDNITASPSKGKVGDTIDLNYTIAGGF

SEQ ID NO: 106544 - protein, 94 aa, Unknown
  Obtained from environmental sample
  misc_feature (1)..(94): Xaa is any amino acid
MDGKDIRQSVPDVHVDVPRLRAGNVGLQVFAAYVPASTDGDQAFAYANERLDAIDAFARSDDRLTLVETAAELRECLTTDKVGVMLAVENGVAI

SEQ ID NO: 106545 - protein, 214 aa, Unknown
  Obtained from environmental sample
  misc_feature (1)..(214): Xaa is any amino acid
GLLRTAAITGIREIGEVAALSVTEALALFGKQGLLLRSMAQGIDGSRVEEQNKEKRITVQADFDEDVVDETAIRGAIEALAENSGLTMRRDKLGATNISLVIVYADGMRAEGREKLKRPCVLDIDIAAIAEKIFNKEAVRRIRIRSLGLCLAGLTPLGYEPDLFEPEPEAANRKLQEAVDKIQNRYGMEKISRGLVLAASKMQGGRRLLSAGAL

SEQ ID NO: 106546 - protein, 217 aa, Unknown
  Obtained from environmental sample
  DOMAIN (111)...(176): His Kinase A (phosphoacceptor) domain
  misc_feature (1)..(217): Xaa is any amino acid
LAQTDKEYESVSVVIKRGINKERGTGRFTLDGMHRMYAIRPVSSQTEDWFIGVVAPLNESVLREVPGSLLLIGLITLIISIPAAIAASIMLRRPYEEADQLRKTAEAMSSSKTKFLATMSHEIRTPMNSILGFSEFALDNEISPKVREYLTKIKINIEWLIHIINDILDISKVEAGKMELEKIPFEMQELFSSCRTLIIPKALEKGIMLHFYVEPSL

SEQ ID NO: 106547 - protein, 275 aa, Unknown
  Obtained from environmental sample
  misc_feature (1)..(275): Xaa is any amino acid
GKTGFSLLIIFITVIEILFLQVLKNTIFQRENGPIIRRRYSRLLPPPKIVKETAAVNKTEQRNTAVVPYAPVSDYVAEKEITETVPEIIEETNEEELKEVDALTAEEDFKPNNDDTVIRALEEAEHAAAVHSEQVRKKNAKHGGASYKKYKIPIDILNEYPDGEYWIIDQATRDAAMALKETLEEFKIQAEVTGIRKGPVITMFEILPAPGVKLSRIVGLQDNIALRLAASSVRIVAPIPGKHAVGIEVPNAKRNIVSFRELIEGELQSGKNMEI

SEQ ID NO: 106548 - protein, 259 aa, Unknown
  Obtained from environmental sample
  DOMAIN (131)...(240): Metalloenzyme superfamily
  misc_feature (1)..(259): Xaa is any amino acid
ASAFTPGVGYRHILIWPDPAPNQAPSRPPHDYRDQDLTPLLNDPAARETAALVRASRPILEKHPVNAKRRAAGRLPANCLWLWSHGRRPAIKTFQERWGLTGAAISAVDLVKGLGVLTGLETPEIPGATGWVDTNYKGKVEAALAALTRLDLAVIHLEAPDETSHRGDLDLKMRALTDLDAQVAGPLLKALPDFGDFRLLAASDHPTPLELKTHTADPVPFLIYSQPPTPEPSGRPFSEAEAAATGLMVSPGADLGHLL

SEQ ID NO: 106549 - protein, 291 aa, Unknown
  Obtained from environmental sample
  DOMAIN (153)...(291): Pyruvate ferredoxin/flavodoxin oxidoreductase
  misc_feature (1)..(291): Xaa is any amino acid
GSAAATVRETVELLASKGQKVGMINVHLYRPFPVKEFLAALPKSVKNIAVMDRCKEPGSIGEPLFQDILTTISEAAMEGVIPLAKVFGGRYGLASKDFTPACAKAVIDNAASAVPKKHFTVGINDDVSNTSLKIDENFRLEKKLFQTMFYGLGADGTVGANKNSIKIIGEYTDNYTQGYFVYDSKKSGSGTTSHLRFGNEPIHAPYLIEPNQADFIACHHTPHLYQVNMLRYAKPGAVFLINTQQSADAAWDTFPKEVHKQIIDKKLKVYVIDGYKVAHDTGMGRRINTIM

SEQ ID NO: 106550 - protein, 280 aa, Unknown
  Obtained from environmental sample
  misc_feature (1)..(280): Xaa is any amino acid
AHCLILTSQYGLIPPAYNFERYRYAHQLPASVAEALSRPASFSGFLKEDPCAMDLSDAEMLNTIISCPLIFQGRHQGSISLFNKLGGQGSQADPPRLFDRDDLELLFSMNNMVSGVLENAITFREVESLAHTNEKIVSYLSILYEISSAMMTTVRYDELVWIITRALTDRQGLGFDQVLIMLLEEDEKNRPPTLVSSAFWTYGQSDEEAVPYEGLAELLKKISKEEAARMIQRGGDMRVRIPVSSENPRLLSRVVLEKKAMMGFRAFEAERDEQLKSFGL

SEQ ID NO: 106551 - protein, 250 aa, Unknown
  Obtained from environmental sample
  misc_feature (1)..(250): Xaa is any amino acid
MDSRAWLLSHRALLAMLIFLSGQVLSWRLWLKLADRPGSRRLIHLLFIFFNLAWLHFLGVIYSGRPVGPAWTWLDRPGLVWQWLHLLSALPMALVSALAGLVRFFTRPRPGRTPQAPGLGASRRNFLKTAAAGGLLGLTGLAGYGVLRQGQPPGLKRQTVPIRNLPAPLDGFVIAHVTDIHLGLWLSQAELRRALSLTAAADPHLVVITGDLVDHDPEFARLYHEPLRTLAGVPHGVWGILGNHDHRTGP

SEQ ID NO: 106552 - protein, 197 aa, Unknown
  Obtained from environmental sample
  misc_feature (1)..(197): Xaa is any amino acid
SAGGNITHPSAVRDPLHTVLAIAKLLALRSKDGIPGLFELWCNASGQPERYHPDFDLADVIASLPLFATTEAYSPEAVLNVISSDHGALKSRYQKNFLRQWEERANELKARYGIHRWEVAAYNGMEERKGITDFGEAGKGGLKICFYDAHNKAVAWIWMRGSATEPVFRIMADASDQFIERDFIDWQRRMVTEADRK

SEQ ID NO: 106553 - protein, 269 aa, Unknown
  Obtained from environmental sample
  DOMAIN (67)...(184): Isoamylase N-terminal domain
  misc_feature (1)..(269): Xaa is any amino acid
INFKGAAAVSGAMPDYRHYSSMLMPSVVNITKRFETNFTGTAAARATSFTGTQPATQRMFWATSETRLGANYNDKKQQIDFKLHAPNATDVTLCVFDKPMDADPIENITMRKDKKTGLWQAELPANRSELKNKPLYYGYRVFGPNWGKSDDFVPGKKAGSEFKAIKDWDNFRFNPNKLAVDPYAREWSHSPNDLKDDPEHKIFRSGNDTYMLDSAKKAPKSVFRIIDDKLISTVQTKRPLASEVIGEVHMKDLTWLANTKNQPGTFLAA

SEQ ID NO: 106554 - protein, 129 aa, Unknown
  Obtained from environmental sample
  misc_feature (1)..(129): Xaa is any amino acid
MDTLEQIKKAIKHAMKSAFYKEYYAGINVDDIKSMDDFKKLPFTNKDNLQQAYPLGLQAVPDEKIVRIHSSSGTTGTPVIIPYTKKDVEDWAVMFKRCYETAGCTSLDRIQITPGYGLWTAGIGFQAGA

SEQ ID NO: 106555 - protein, 238 aa, Unknown
  Obtained from environmental sample
  misc_feature (1)..(238): Xaa is any amino acid
MDQAASACGGAAFIDFANPDSVLLRKIPFDPLVAGYALCVVNTGGSHANLTPDYAAIPKEMGDVARFFGKKFLRELELSQVLAAAPEIRKTAGDRALLRAIHFFNEDLRVAEMAALLERAGEPMHGFLELVSESGDSSWELLQNIYSPGDPREQGLSVALAVSREFFRARGMKAACRVHGGGFAGTIQAYVPIDAVEDYGAQMEALFGAGALSRLRVRQAGAVEITGSATDGCTDGFM

SEQ ID NO: 106556 - protein, 205 aa, Unknown
  Obtained from environmental sample
  misc_feature (1)..(205): Xaa is any amino acid
MPELNLNDIAARLESLEETIIHRLIDRAQWRLNDNAYLQGASGFPGTEQRSLFELRLHSQEEMDAKFGRFCVPEERPFNRDLPKPLRAVSFPDTGVNLKDYDTVNLTEPLLNSYMLILPKICLAGDDGQYGSSVEHDVYAIQAIARRVHYGAIYVAESKFRQDPDGYKKLVEARDRDGLMERLTRKDVEKKIIERVKTKVKNLQA

SEQ ID NO: 106557 - protein, 266 aa, Unknown
  Obtained from environmental sample
  misc_feature (1)..(266): Xaa is any amino acid
MPWALFPARVDRAPGLLPPELGYSGQLGAIVGMSYFQPLGDAADATISPTWHSKIGTMWALESRWEPGITHKGTFSGRYIRPKDTAEARYRFGLQEIWDLENGWLVRADINNASDQLMDTEFGKSGPMPIGAPAYDSTIFVGKNFKWAALSLFASDNRSFFQPDDPFYNYNFPASLQKIKLPEGQLRFFPVPIGNFYIDGSSRIGQFGYYLDLGEENPVSKYTWKRSDHQVRLQGHLGRWGLLRADLQLGARFTHYSAVLSDSFLD

SEQ ID NO: 106558 - protein, 73 aa, Unknown
  Obtained from environmental sample
  misc_feature (1)..(73): Xaa is any amino acid
METIEKLRKNGISLEYKDIILLCKKYHINELSIFGSSIRDDFNQNSDVDILVSFGNKAEISLFDIMDLENEFH

SEQ ID NO: 106559 - protein, 160 aa, Unknown
  Obtained from environmental sample
  misc_feature (1)..(160): Xaa is any amino acid
VKQNKLFIILAAAAIILGILNSSLIMKPPVYNAEKSDYDMNTVKTDLETIAKESHTVADQTALGEVREYLLSRFSDMGIGTSVKTYTVNNWFGEYEINNIFAQIDGKPGNPYVLIMAHYDSVMENLLMEPTKSTGAADDGYGVVTLLQIAQQYSKKEKRL

SEQ ID NO: 106560 - protein, 173 aa, Unknown
  Obtained from environmental sample
  DOMAIN (93)...(170): FR47-like protein
  misc_feature (1)..(173): Xaa is any amino acid
EDQGYYAADRIDYELMNLDDALKPGTLRGGPAALTLRPPLPEDEDALFALQSAYEQEEVLPVNAVFNPAVTRLNIRNILEREQVLVAELAGQVVGKINTSAESFTRYQIGGVYVRPDCRNLGIGARMTAVFAEGLLAQGKGLSLFVKKRNAAACKVYRKIGFSVTADYRITYY

SEQ ID NO: 106561 - protein, 235 aa, Unknown
  Obtained from environmental sample
  DOMAIN (180)...(215): Sel1 repeat
  misc_feature (1)..(235): Xaa is any amino acid
NSQYNLAVCYENGDDVPQDNEKAVYWYTKAAEQGDALAQYRLGFCYDRGQGVQKDFEKAAYWYIKSAEQGYLVAQDSLGFCYLNGKGVPKDIEKAMYWYTMAAEQGDLNAQCILGCCYEKGEGVPQDYEKAVYWYTRAAEDGIDSAQFNLSLLYYNGQGVPQDYEKAVDWLTKSAEQGNIGAQLVLGLCYMQGQGAQQDHEKAAYWFAKSMEKGDNQAQEFLNQLEAIQSEENNA

SEQ ID NO: 106562 - protein, 212 aa, Unknown
  Obtained from environmental sample
  misc_feature (1)..(212): Xaa is any amino acid
MKKVWTKASFNNEITEREVAHRKLAREAAAESIVLLKNDGTLPLQTGRIALFGAGAAATIKGGTGSGEVNERHSVTIWEGLKNAGFMITTEDWLKDYVELLKSEKEKFYKAFFKKMQKAMFGSDDLRINIMSGGFHYPVGRLITDGEISATNTDVCIYVIARQAGECSDRKFENHEYTLEPDEIANIKLCAAKFKKFILAINIGSSIDMSPL

SEQ ID NO: 106563 - protein, 106 aa, Unknown
  Obtained from environmental sample
  DOMAIN (34)...(62): SecD/SecF GG Motif
  misc_feature (1)..(106): Xaa is any amino acid
MPWRICVALAVFVLSLVYALPSVPGIGESLLGRILPDKKISLGLDLKGGIHLTLGVEVSKAIANSLAQTGHDLRATAQEDGVVVLRPRVIAGNVLEFTLPRGEQKE

SEQ ID NO: 106564 - protein, 276 aa, Unknown
  Obtained from environmental sample
  DOMAIN (1)...(29): SecD/SecF GG Motif
  misc_feature (1)..(276): Xaa is any amino acid
MLVGGGPRMGIDFVGGVIVQVQFQRPVQDEALKNSLDVKHLPGLSTQRFGEGGRDYLLRFSMTETPAQELREGVLEVLKTAFPDNAAEVARLEMVGPKVGADLAQKAMEALYYAVLLIAVYISGRFEQRWLAAAIMTAALWGGVYVVSLFGVGTGGLVLAALGITLAVSWRLKLNFAFGAVVGLLHDVFITLGILSVLGKEIDLNVVAALLTLVGYSLNDTIIVYDRIRENLRKDSPLDLGDVINTSVNQTLSRTLLTGGTTFVAVLALFLLGGGV

SEQ ID NO: 106565 - protein, 204 aa, Unknown
  Obtained from environmental sample
  DOMAIN (1)...(203): Protein of unknown function (DUF1015)
  misc_feature (1)..(204): Xaa is any amino acid
AVKVAQKRREANSGYTGGEEFNYFLAVIFPSDELTIFDYNRLVKDLNGLTEDAFLEKVRLSFNVEKASDSALGSASGALKPQAKHEFGLFLKNAWYRLKAKNGIWDDSDPVARLDVSILQNYLLKPILGIDDPRTDKRIDFVGGIRGLSELEKRVYSDMAAAFSMYPTTLDDLMDIADAGKIMPPKSTWFEPKLLSGLFIHDLT

SEQ ID NO: 106566 - protein, 200 aa, Unknown
  Obtained from environmental sample
  misc_feature (1)..(200): Xaa is any amino acid
MVENLNYNVPGSKCGGADGSLKDENTPNCDKYGRLYDWATAMALPSKCNEVLSTSDADCAITTPNHRGICPSGWHIPTNADWDALYRSADGTSGTSSPYSSPTAGKHLKAKEGWKDCVPSGSGKDYLCEDTFGFSALPGGLGNSYVDFISAGGDGNWWSASEDFSIRGHAYSRSMYYSREDARYYDSEKDYLFSVRCVRD

SEQ ID NO: 106567 - protein, 220 aa, Unknown
  Obtained from environmental sample
  DOMAIN (140)...(220): Sigma-54 interaction domain
  misc_feature (1)..(220): Xaa is any amino acid
MATILIIDDELGVRQSLAAILEDEKYRVISAEDAVAGMKILEEQKADIVLLDVLLPKLGGLEALEQIHANWPGVEIVMISGHANIDMAVRAVKGGAFDFLEKPLSLDKVLTVCRNALALRKLREENRKLKKSASLVHKDIIGTSYAINGIRELARQAASSDARILITGENGTGKEVVARAIHLGSSRSERPFVGVNCAAIPDTLLESELFGHEKGASPTR

SEQ ID NO: 106568 - protein, 264 aa, Unknown
  Obtained from environmental sample
  DOMAIN (3)...(263): RNA polymerase Rpb1, domain 5
  misc_feature (1)..(264): Xaa is any amino acid
QEGLTVLEYFTSTHGARKGLADTALKTADSGYLTRKLVDVAQDVIINEDDCNTMDYIEVAAIVNSDGTIRARLRDRIMGRVVAEDVMDPYSKKTIAAMGTLITEELAFTIETSGIQSVKIRSVLTCESKRGVCAKCYGLNLSTGRLVDLGEAVGTVAAQSIGEPGTQLTMRTFHVGGAASRASEKNLHEAQVKGVVKLDGISSVKNRDGSLVALSRKGNILVLDHDGNERERYKIAPGATIKVKDGEQVEPKTPLAEWDPYNDC

SEQ ID NO: 106569 - protein, 273 aa, Unknown
  Obtained from environmental sample
  DOMAIN (1)...(273): Phosphoglucose isomerase
  misc_feature (1)..(273): Xaa is any amino acid
VDPDDASAIIASCPLEQSLFVLVSKSGTTQETLANELFVKGKLAKAGLDSSKHMIAVTSETSPLARNPAYLDSFYIDDYIGGRYSSSSAVGGCILSLAFGPETFREFLAGAAEADKLALRPDLQENAALLDALIGVWERNFLGHPYTAVLPYSQALSRFPAHLQQLDMESNGKRVNRDGEPVAYSTGPVVFGEPGTNGQHSFYQLLHQGTDIIPLQFIGFAESQLRDDVTVDNSTSQTKLAANLAAQIAAFAKGPDSADRNKEFPGTRPSSLI

SEQ ID NO: 106570 - protein, 89 aa, Unknown
  Obtained from environmental sample
  misc_feature (1)..(89): Xaa is any amino acid
AISHFDEAYREGLFYRIIGTNAVYQEEVVKREWYVNVNISRLFAHVISRLHQNQSVSHLLDNAAIINRLLSQTVIPEPQHELPFVNNGE

SEQ ID NO: 106571 - protein, 131 aa, Unknown
  Obtained from environmental sample
  misc_feature (1)..(131): Xaa is any amino acid
MNEPTLELPKEGDKVGAGIILDLISAGGSARVYRTWIASLELQRAVKIMNPEADNEVRDRFATEARITAKLLNPHIVQVYNYGETASGLPYIEMELVTGLTLESVLRQRGALPLPVALCNMTGILEAVHYA

SEQ ID NO: 106572 - protein, 256 aa, Unknown
  Obtained from environmental sample
  misc_feature (1)..(256): Xaa is any amino acid
EIKERSSGADYARGVAVDNPVNINSVYNSIIVDAYDLAKAEPPVIRAKPNGAAYAVGVTPKPLAVTAYVRSGALSYQWYSNTTAANTGGTSISGATSDNFTPPTTAVGTTYYYVEVTATDGALIPVTITSGPAAVVVSADGAAPAITTQPESISILEGEKAILSVAATVSNGGTLSYQWYANTNPANSGGIPLDVSTASYTTPSFEKPGTYYYYCVITNTYTADGSAKTATVASSVATVTVSAIVDAESPNITSQP

SEQ ID NO: 106573 - protein, 171 aa, Unknown
  Obtained from environmental sample
  DOMAIN (8)...(171): Tryptophan synthase alpha chain
  misc_feature (1)..(171): Xaa is any amino acid
MSNIKNAFKNGKAFIGFITGGDPTIEKTKEFILEMIRAGADLIEIGIPFSDPIAEGPVIQEANNRALAAGATVEKLFNLVAGLRKETSVPLLFMTYVNPVFHYGLATNKVNGQAGYDAFFKRSGEVGLDGIIIPDLPFEEQSPVKEAAGKFGIDVISLIAPTSETRKRKSQ

SEQ ID NO: 106574 - protein, 50 aa, Unknown
  Obtained from environmental sample
  misc_feature (1)..(50): Xaa is any amino acid
GTVALFLAAYGMDVIDMGPPLLSMHSPFELAGKADLYATVEAFAAFLAGE

SEQ ID NO: 106575 - protein, 275 aa, Unknown
  Obtained from environmental sample
  DOMAIN (144)...(189): Pentapeptide repeats (8 copies)
  misc_feature (1)..(275): Xaa is any amino acid
MLDAPEANVDSPQMGLAPEELCASANLKRDLKPCPEWLYEALLEHERFVRTKGTDGTATNLRGADFEKCDLRGCDFRKHDLHSANFYMADLRWVHMDKCKMQEANLRGCDLSDAVLTGAELVKADLSNAILWGARLSKANLHGANLTDAQLAPIMTNTKTKMNGVNLSEAILDRASLNDMDLSGTNMQSASLQHACMASADLQCTNLDGADMSDADMIGVNLTDATLIRATLNRAVLGCAKLNQANLSEAYLRDTDLGYASLRYATLVKANLAGA

SEQ ID NO: 106576 - protein, 262 aa, Unknown
  Obtained from environmental sample
  DOMAIN (222)...(261): Pentapeptide repeats (8 copies)
  misc_feature (1)..(262): Xaa is any amino acid
MTKTRAHTQEIQTPARVAGAEIGASAPPVVHDAPDTGVETPQMGLSPSDLDVAIPQKGLKPCPEWLAEEIEEHRRWLTSSGREGTRLTLYGSDLRNTDLSGMLLNSACLIGVDLTGANLSRAGLRDAILVDANMNNADLSGAVLDYANLAAATFHGANLKGAYLDGANMTGAGLHRTNLEDAHLYGTNLTDTNMNEANLRNAHLRKAIMPTAYLTCAKLDGAHLESAGLQAANLAGASLRGAQLVNAKMALTNLLGADLSGA

SEQ ID NO: 106577 - protein, 273 aa, Unknown
  Obtained from environmental sample
  DOMAIN (123)...(200): Bacterial Ig-like domain (group 2)
  misc_feature (1)..(273): Xaa is any amino acid
VPEHPAPDDGFSDGYIQPNGATAAGKYSLKIENVTGPFTLTINYTARDTQKSFPIIFINGDEVERGDEANGDSDPKSVTYEYTDSDTVMIQLGNANSAGSSGAGIRIFDVILTLKGGSGSQVLVDSITINQGDFSLVEDDTQQLTVNVLPETAASKKVDWSSDKTGVATVSSTGLVKAVAEGTAVITASARDKSGKYGSITVTVESSWNGDPSNPWALNPDLQELRAFPGAEGYGQNVSGGRKGKVVKVTTLDDAATNPPGRSLRWALQQYPG

SEQ ID NO: 106578 - protein, 257 aa, Unknown
  Obtained from environmental sample
  DOMAIN (1)...(97): NlpC/P60 family
  misc_feature (1)..(257): Xaa is any amino acid
MDCSGLIYASFKDAVGASLPRSAASLYSWVEKIPFDKAQPGDLLFFKTDSSGKITHVALYLGGRRFIHSASFGARTGVIYTTLDEGSWLRNFAGAGRAFPETSEDYQRTQADGRSGAASAGGRGGSQFGITPEPAVSANDSGARNILFGAAFASTWKGFVKEGGMFRGFTSQFRAGFNTELLNLPMLFGIEFRPEYDGALGVFRLPLTLSWGLSDKLRIFAGPVLSLGEASLSTSDGERRYSGGTSFLGTIGITAAP

SEQ ID NO: 106579 - protein, 240 aa, Unknown
  Obtained from environmental sample
  DOMAIN (57)...(233): Domain of unknown function (DUF323)
  misc_feature (1)..(240): Xaa is any amino acid
LTHNPAGAAWLADTLSKDSLNVLISSAWYQNQIAAFAEVTAGESLAASPGEQSDPELPASQIRVGGVLFTGVGGGILVQGEPFPHRVPVSAFMICATEIPAPAYADFLDAVPAWRTDQKETLEQQGLVTNEYLADFEDTVPVGRSWINAGVNSVSWHAAKAYCEWLSGKLPASFAGWEIRLPTEAEWEYAVKSAQKWGGRGIFAPDGGVWEWCADPYSPLPFFAAPPEAIAAAGSPERSL

SEQ ID NO: 106580 - protein, 292 aa, Unknown
  Obtained from environmental sample
  DOMAIN (144)...(213): HAMP domain
  misc_feature (1)..(292): Xaa is any amino acid
SPALWCDTVAVPGLRQDEYIIVHIRKLYDAVSDETGFLLAGIRENSLLNVLNASNIETMLINGQGIVLSAQEKAIIGSRLTDSDLLTLVLDNNRYARSAVIGEGKGRRSVLFKRTVANDVVFIVISDYLSSIGLAQISDFAVKCLIVAVIGIIVSGLVSIWLSRHLSAAVIDLQRVVRSFYNGDLSARFVFHGNDDITYIGEKFNSILDYIEDLFKIQEQDNKVKRNLEIRLMQSQINPHLLYNTLDSVIWSLKNRDLQRSQEIITSLSAFFKMSLSHGNSLIPLRSRLALI

SEQ ID NO: 106581 - protein, 238 aa, Unknown
  Obtained from environmental sample
  DOMAIN (115)...(198): Cache domain
  misc_feature (1)..(238): Xaa is any amino acid
MTADIAGSFYTASQGWGPKPLPRIMAGEVPPPRPYLYIPPGVDFSRVRAEAELAGNISEILRQITVVDRGIATTTIAGESGYVIAMDAYTWPWTDYDPKLFQWYKGAKDTGGLYWTDLYEDHRGRGPVITCAVPFYDRSKGNRIFKGVARSTVLLSDFSRIIDSTEAGRSGRLFILNREGIMLYSSEGAAITIGEGGAVTGENFLESRNPRQRSLGRSMILGAAGLTELEMDGIPVYV

SEQ ID NO: 106582 - protein, 245 aa, Unknown
  Obtained from environmental sample
  misc_feature (1)..(245): Xaa is any amino acid
ECEGSDCHLHGTMINGKFHGSYIESDVGEHDFCGGGGYSISGNYKNGKKDGEWIEWDVVMSKVEYYRDGVKYNEWRIDDGRWKLFDGNGNSATVNNTNYVAEDGVLYNRDKTVLVSSGWDKRKTFTIPNSVKSIEHLAFYSLLRDLTSITIGSGVTDIERIEWHNGCGGDSLKSIKVVADNAKYSSENGVLFDKNKTTLIRYPANKQDTSYTIPNSVTAIADGAFSGCSNLTSVTIPSSVISIKD

SEQ ID NO: 106583 - protein, 249 aa, Unknown
  Obtained from environmental sample
  DOMAIN (5)...(240): N-acylglucosamine 2-epimerase (GlcNAc 2-epimerase)
  misc_feature (1)..(249): Xaa is any amino acid
TEHYGLDPSEGGYIEACNREWRSIDDFRLSGKDLNCPKSMNTNLHVLEAYTNLSRTSGDERVHKALEALLHIMIDKIVNNNWHFELFFDMSWNSLTEDISYGHDIEGSWLLYEAALAVGDESLISRVKQTALAIAEVIYTTAIDSKNGGLISGCDEQGHNHAKKEWWPQAEAVVGFYNAYELSGDQKYFTAANVIWNYIQKYFLDHTCGEWHNELNPDNTPDTSMPKAGFWKCPYHNARACLEVIRRMR

SEQ ID NO: 106584 - protein, 278 aa, Unknown
  Obtained from environmental sample
  DOMAIN (2)...(276): RmlD substrate binding domain
  misc_feature (1)..(278): Xaa is any amino acid
MNIFITGTSGLIGGYIYQELKKIDLYNIIAINREIIPDLVDFNTVNSLGKIGSADFLIHCAAKIPASNINMDDVIDFNRRIDRNIFEYCKSNGTKIIFLSSMSVYEYYGKDIVIDETMPILKYSGMNNYFHEKVNSERMFMKLDNTVIFRISSPYGKNQKNINVLKIFIENVKQNKDICYYGSGQRTQDFIHGFDIASAIICVLHKNVTGIFNIVSGEAISMKQLAFIITKLAPDYNGKIYSNNIDDPQESFRANFSNMKARELLGWIPSVSLSVGIA

SEQ ID NO: 106585 - protein, 195 aa, Unknown
  Obtained from environmental sample
  misc_feature (1)..(195): Xaa is any amino acid
MPCTEKRARLLLERGRARVHRVVPFVIRLVDREQASSALQPVRVKLDPGSRVTGIAVVRETESVDAETGEIQRGAVVLSLMELQHRGGAISEALTARAGLRRGRRSRNLRYRAPRFDNRAKPEGWLVPSLRHRVETVQTWVNRLCRWAPVTGLSMELVRFDLQQQENPDISGVEYQQGTLAGYEVREYVLLRGGH

SEQ ID NO: 106586 - protein, 273 aa, Unknown
  Obtained from environmental sample
  misc_feature (1)..(273): Xaa is any amino acid
RRFDLEGLSTAFPFVRFILSADDLSRGEEINIAARELASPFFLVLWNDLRIMRGGAERIAERFMDSYKDASRDPSKEQRHTRLCTVPVIQDGRFRTIPTLIAPMVIKGRVKTIPLMPDREGQASLYPFDGIGIYDRERFERLGGFDKSLLSFYWQLMDFGFRSHLWGEEIVVNTAIKFSYEGAVTPEDETTEDSFRRFYLKNLAPVFRGDHADLPLRRFPGFLLRLRMDLLSAWEEFFQARAWVRTNRYRFHCDARTVAELWGEAHGEEAKVS

SEQ ID NO: 106587 - protein, 212 aa, Unknown
  Obtained from environmental sample
  DOMAIN (41)...(206): GGDEF domain
  misc_feature (1)..(212): Xaa is any amino acid
TYQHNFWGFALFGDTKNERHFEEDVIEMMRSAAFLFANAFLRAEVEYDALTGIYNRRYFDETMEHIISSLSRSESLLSMLMIDIDFFKRYNDTYGHVEGDKCLKTVAQTLSQCITRADDFVARYGGEEFIVVLPNTDEQGARLIADKMLDNIRSLNLPHEQSEAADYVTVSIGGTTGKVLHTHNAGDFVKRADELMYKSKQEGRNRFSFGWF

SEQ ID NO: 106588 - protein, 250 aa, Unknown
  Obtained from environmental sample
  DOMAIN (69)...(102): Tetratricopeptide repeat
  misc_feature (1)..(250): Xaa is any amino acid
VGTYTTLGLIYQDRGQYKDAMEMYSKAIKMEPANVDVLTALASCQAASGEVKAAIISYEQVVMMNAGAAREYKDLGDLYTKQKNTDEALRCYTKYLEKVPSDKATSASVGKIYYEQKKYAEAAKYISLAQSSEPAMLLMYADASIQSGNVKNAQSALEELRGRKPHVAEIGRVLSLLGELYEKDGKQSQAASAYAEYVGLSGVKDREASYKAAFLQEKTNPGAAIKIYEANVKAFPDDARNGLRLGLLYS

SEQ ID NO: 106589 - protein, 284 aa, Unknown
  Obtained from environmental sample
  misc_feature (1)..(284): Xaa is any amino acid
MHVIGNLNLGMLNFDAFMASVLPLPEALAELISPAEALAATVAPARTAPPQPASVAPKAPSAASGLPSVDMDLTCALLTVFKLQFKDIRAKARGQGLYRIEPLLLNLGSGGTVNLNLGIDATAMRYTATGKASNVAVGPLLQAVQDKRPVEGTANLDLDTLACAGTTPKAIQASLSGKGLLTVRGIVLNDVSILPKDAPAGIGKPPTHFEQLLAPFTAAAGIVNLAPVALTSPSANVKGHGVVRLPQENMDFTADVSMLKMTIPVQVSGPFSALSYGRTANAPC

SEQ ID NO: 106590 - protein, 65 aa, Unknown
  Obtained from environmental sample
  misc_feature (1)..(65): Xaa is any amino acid
ALEGKGLPYLGQNRYGDLLVEVIVQTPTRLNSRQEELIRELDQLLQEEESPLDKVKNAAKKIFRK

SEQ ID NO: 106591 - protein, 280 aa, Unknown
  Obtained from environmental sample
  misc_feature (1)..(280): Xaa is any amino acid
VIDCTQEMTNDRESLLRHIAEHLKDSGKRMSDRFLFMANRVDELDPAKEDINEALERHKSYLEDFGIAAPRIIPVCSLLPKLIRSHRAGADLSKDENRKMNTLQSCFAEDEDRRLLQYVTPPKTGKRVPVSSAVAARIRKRLAAANDTQELAVLHSGIPTLEEAVWEYVSKYGLTEKVNNLMENFRREFSQQKALQDLLVAKAADEDKLKELNEAMKTADDKMAAGEEAKSFRARLRALSLKDTKFYQSRLGKIRSKFYDDSQSVTASIPKKKVPLETGK

SEQ ID NO: 106592 - protein, 267 aa, Unknown
  Obtained from environmental sample
  DOMAIN (70)...(236): GTPase of unknown function
  misc_feature (1)..(267): Xaa is any amino acid
WRNGWSLWSSHQKIKDRPDGGIVLEMMSRSDNVKPTLSARSGGAFLGKGQAGTGKRPDSISIRPAKAPGLHILLMGNMSSGKSTLVNALLGRGLLPSANAATTAKIFRLVSRGDIPAGKMFAAADGQEVTSEDARKYNANGRGQSVELVCCFSSMAHFGRDICLYDTPGPNTALYKGHGAILREFIEGHSFSHILCVLDATVHKTDDEKSLLADYIAAAQSKNQGARVVFLLNKVDALDEEREEPLHEVMASAVEWLQKHGFSEPIL

SEQ ID NO: 106593 - protein, 251 aa, Unknown
  Obtained from environmental sample
  misc_feature (1)..(251): Xaa is any amino acid
YQDTNAIQEKIYFALAAGYKNICVVGDDDQALYRFRGATVENLVEFESRCEKYLGVRPARIDLDINYRSRQKIVEAYTGFINLINWKKYPPKTGFYRINDKNIKAYHQDHIPSVIVTDHTIADNVYSQVAHFIYDLKKSKKIEDYSQCAFLFPSLWDSYNNRENTRVMGFKKAFEDINHELNLFGSQDELKIYAPRAGRFLEGDEAKAIWGILLKVFGMPHYDEALGRSLTAYREWMSDCLETARNLCDAD

SEQ ID NO: 106594 - protein, 190 aa, Unknown
  Obtained from environmental sample
  misc_feature (1)..(190): Xaa is any amino acid
YDYRYLKSLREFKDKNDNDMAFGTLQDFEGDIDLVFFSRVYSECKTLLNLDEIIAFKGNIDPENERDPQKISFKVSSIADFAQLTRAAARKAAAGEAPPSRNVEEKKAVEKPQEEIHIKLAEGAADNEENLIPLRDYLAENTGSCVIFLHIPVLGKERIIRAFSGVEISGGIDVIEEIKKCKCVDSVWRK

SEQ ID NO: 106595 - protein, 142 aa, Unknown
  Obtained from environmental sample
  misc_feature (1)..(142): Xaa is any amino acid
APAYTGIIIIAAESLPMYGTRSAALLRPCLFPKIWDMDMKLIFERNMFNPRSGAMVHYCSMREIFAGGPSGLSREIAAIVGNRPLRIFARGIFGMQPTDPIINKEDALQIISNKENRSLLSEGRVAIIIDDTLLVNPLSSAE

SEQ ID NO: 106596 - protein, 245 aa, Unknown
  Obtained from environmental sample
  misc_feature (1)..(245): Xaa is any amino acid
MDKWVSFDRNLLALSAHNPALCSQLSVAETTRGCYKFLESHSGELIPAIVDRSGAAHALHSTVDPVREAERLVSILSKDRNGLIAEGFVVFLGLGAGFAPLAALNSGVSHVLVIDYDINGIAELLCSRDYITLLGDPRCTLLVDPPPDLIENIILELYRPVLCGGIRALPLRARTELDKQNFGAAADAIQRTIEKISADYSVQAHFGIRWFANIIRNLGTAQRQNRSAPPIREAAICAAGPSLDD

SEQ ID NO: 106597 - protein, 281 aa, Unknown
  Obtained from environmental sample
  misc_feature (1)..(281): Xaa is any amino acid
LPFSFWIFKNGYKNKEDAYVGGYFSSIDLYKNDDLQSFPEFSRYRSNEREMIYIDTYPSKLQESYEVLAHEMQHLMNFVSTRVFRNEKGTLYPMDTWVDEGLSAAAQWVYSGQISNERVIWYNYNGDKNGTVKGLIDKGNNFYIWGNHKENNVAILDDYATVNLFFQYLRLQSANPGDIYYDIISSKYPDYDYRAVTNAKNINSAHKNNWPLLLRDWHAANYINSANGLYGYMNDPVLKGIKAPMFNDAATTIDLFPGEGVYSITNAAGTLPTTSGNIKYA

SEQ ID NO: 106598 - protein, 182 aa, Unknown
  Obtained from environmental sample
  DOMAIN (1)...(176): Predicted permease
  misc_feature (1)..(182): Xaa is any amino acid
ADNEKESGAIAAEAQKILGQGNVVTEWRDNFWVAMMKMVTPIYTMIFLVFLIVASFLIINTVVMIIHERIKEIGMMGCLGMTRAEIVKVFFFESLFLAMFGAFAGVIVGGVIAGIGSMYPLRLGDMYGDTFSEMPLGNAIFLGISPFIIIRAWLLGVVVASLFTLIPSLKSAFVEPVEALRR

SEQ ID NO: 106599 - protein, 74 aa, Unknown
  Obtained from environmental sample
  misc_feature (1)..(74): Xaa is any amino acid
MKDELFRRLLVSIPQLLLMSFITFLFIDLAPGDVLAQYRFDPRITEETVREVEAKYHFDKPVLVQYGHWLLRAV

SEQ ID NO: 106600 - protein, 272 aa, Unknown
  Obtained from environmental sample
  DOMAIN (166)...(270): Peptidase family M23
  misc_feature (1)..(272): Xaa is any amino acid
VGAKEIETGLLNILFGGTSGKAYSSYTDEQVLFAQQLMSEAGMKHTAKDENKFRTYLWDNNKKLPLDMQTIMENVGSTVAAQVFARYYEGNAIASIAMTLGKNIDSLKINYITNDALSRFTDKLVPDVLNFYISMQSFLDASANFVITGKHGAIDPKYVYKNYEKNAHFGTDFANGKEGDSIYLGISGKVVLTAAEEKPKEGNGNWMVAEYGYKFDGSFIGTGIFGEYMHMEKKPGFANDSYLNSNQKIGTVGNTGNSSGAHLHYSIYTLSE

SEQ ID NO: 106601 - protein, 76 aa, Unknown
  Obtained from environmental sample
  misc_feature (1)..(76): Xaa is any amino acid
MSALARLPKIIIDLAVPRDVEPSIKDLSGVTLLTIDDISGDGRRLSQESVATTESIIDEHIAKYNKWLLVKDGKNV

SEQ ID NO: 106602 - protein, 118 aa, Unknown
  Obtained from environmental sample
  DOMAIN (4)...(118): MoaE protein
  misc_feature (1)..(118): Xaa is any amino acid
MTPFVHIQESPLNPESIREAAKDPKSGAVVIFEGCARGSHEGRAVAELSYEAYVPMALSQLQALRERAIAEFSLNACFIHHRLGTVPISEAAIVVACASAHRAESFRAAAWLWTKSKN

SEQ ID NO: 106603 - protein, 128 aa, Unknown
  Obtained from environmental sample
  misc_feature (1)..(128): Xaa is any amino acid
DALFLAPGTARPRRIHAPLLTEDEILRLVEWLKERGRPDYNQALIKAMDSEDDGASAAGSEAGGGDDIYTMAVAIVMRERKASTSLLQRKLSIGYGRAAKIIDRMEAEGLIGPDRGSGKPREVLADAE

SEQ ID NO: 106604 - protein, 128 aa, Unknown
  Obtained from environmental sample
  DOMAIN (30)...(128): Ribosome recycling factor
  misc_feature (1)..(128): Xaa is any amino acid
LNVYFGGAMATTVDSIIEDTKKKMKQSIETLRKELATVRTGRANPSILDGVQVEYYGSSMPLNQLAGVSVPEPSCLLIQPFDKASVKAIETAILKSSLGLNPANDGNVIRLPIPALTEERRKELSKVV

SEQ ID NO: 106605 - protein, 283 aa, Unknown
  Obtained from environmental sample
  DOMAIN (1)...(283): EPSP synthase (3-phosphoshikimate 1-carboxyvinyltransferase)
  misc_feature (1)..(283): Xaa is any amino acid
GNSGTGLNLFCSAAALGERERRFDGDASLRVRPVRPLLSALEQLGAVVNVDGPERDLPFVIRGPLKGGRATVDGISSQFVSSLLFAAPLMPKDTHITAHNLHEQPYIEMTLWWLAGQEIEIEYSKELTSYKVRGGQRYKPVDTVIPADFSSAIFAATAAAIGGAPIELCGLDFSDTQGDKEVFRHLEAMGATVERGSDTVIVTGGGLSGTIIDLNRTPDALPALAVAAAVAEGETVFTNVAQARIKETDRIAVMAEELGKMGISAKELPDGMVVRGGKLKGAR

SEQ ID NO: 106606 - protein, 272 aa, Unknown
  Obtained from environmental sample
  misc_feature (1)..(272): Xaa is any amino acid
RETRRIYGNGVRQETQYDAVGRVILIREVNARNQLLRAEGYLYDDKGRRTHGVDEEGRITKYLYDNQSRLMTVMYPWTKEKAEADRKEAEGAGLYFTADKGSGERFTYSAAEITKLRELLDRAAPARGNAVQASQTVWRESYTYDRNGNRASKSNAWGVIRYEYDGENRLVKKGDIVITNDKDGNTLTEKGTRYEARYEYNGQNRMVYSEVTSHADRTHSVSVYDYDALGRRTLTQNVTGQTLRTVYDGRSFEVIREGETFRDGSLTTSFQA

SEQ ID NO: 106607 - protein, 141 aa, Unknown
  Obtained from environmental sample
  misc_feature (1)..(141): Xaa is any amino acid
MSNHERSDLIPLEILDTSLRDGAQGEGITFSVQDKLDVVRALDDLGISWIEAGNPGSNPKDMEFFRLAGDLNLKHAKLCAFGPTRKKGIKTNEDSGLLSLLDAQTHAVVIFGKSWDFHVSEVLRVSSEENLAMIAETITFL

SEQ ID NO: 106608 - protein, 58 aa, Unknown
  Obtained from environmental sample
  misc_feature (1)..(58): Xaa is any amino acid
MRVEYINPFVESAFNVLKEVLNASVKRGEIYLKPTSMSIMGVAALVGLAGDVEGRCSF

SEQ ID NO: 106609 - protein, 224 aa, Unknown
  Obtained from environmental sample
  DOMAIN (41)...(220): CheR methyltransferase, SAM binding domain
  misc_feature (1)..(224): Xaa is any amino acid
KANDEWIHKRFGEWSNGRSGDSLQLKSASEAEDFLSDFPSPSTGDFWTDSYAAAVKKVIPDYSGANLNVWNIGCGKGYETFSFACILKSRFPKTRIKIWANDNDIMAVSQAPNLTYNIDEVPAFCKPYMVQGKNGYVFNQEIKDMIVFEYHDVVHDSTLPDLDIILVRDMLSYLPEEDQNRLVERFSDKLKDKGVVFLGRNEELTGIVWQSLADDPVSAFLHSA

SEQ ID NO: 106610 - protein, 90 aa, Unknown
  Obtained from environmental sample
  DOMAIN (1)...(90): FliP family
  misc_feature (1)..(90): Xaa is any amino acid
MWPTFETIYNNSIKPLAAGELSVQNAYRAAETPLKIFMYSQMGGRNNNRNLTVGQKNIKLFMAMRNLDEPSTLEDVPTYILIPAFILSEL

SEQ ID NO: 106611 - protein, 268 aa, Unknown
  Obtained from environmental sample
  DOMAIN (153)...(268): Miro-like protein
  misc_feature (1)..(268): Xaa is any amino acid
VLYFPAPHSYTGEDVVEFHVHGNPLLVARLMEYLGQIGIRLAQPGEFTKRALLNGKQSLLDVEALKDLMGAATDAQLRQAQARSGGVPAWVAEARAKIASLSARVEACVDYGEDEGIAFDMRHLKGEAKALAALFHVEQKRSSSARWLRDGIKIAIAGRPNAGKSTLFNALASEDRAIVSEGPGTTRDILEARCEWAGLPLLLFDMAGIRETSDPVEKKGIAKIAPVLQEADLILHLVPATDDCPDPEMMSRLNPYSEKVLTIRNQCD

SEQ ID NO: 106612 - protein, 63 aa, Unknown
  Obtained from environmental sample
  DOMAIN (1)...(61): Ribosomal protein S6
  misc_feature (1)..(63): Xaa is any amino acid
NGVEIEKTDETGDRDLAYEIKKRKRGKYVLFTVKADPAKITNLDRAFKLNANLLKYLFVRIED

SEQ ID NO: 106613 - protein, 288 aa, Unknown
  Obtained from environmental sample
  DOMAIN (145)...(223): Bacterial pre-peptidase C-terminal domain
  misc_feature (1)..(288): Xaa is any amino acid
MGQHPVSYSSSSYDKTSQSCEISAVFPETAPLTPTDRIEYYWVDEHGSLVTTSGGATSILSGSTLTISPSGATGYTVQKWYVNGVDTGQSGSTYNFSIATVGNHSVDLFLTKDGKLYSTSITIEVLSNALTANTWTSGNITLTNTEQWFKFTSTSSTTYIHVNVGTLTSLNVRLYGPTGEVGSQTTYSGSTRYNSWSLTSQQTYYIKVTPSNTTATGTYQIAFNTSSSTPVTLPTDSNAPMLTANTWTNGSIASSSGEQWFRFTATATSHYIHVNFGTLNDLYIQLYN

SEQ ID NO: 106614 - protein, 132 aa, Unknown
  Obtained from environmental sample
  DOMAIN (21)...(131): Diacylglycerol kinase catalytic domain (presumed)
  misc_feature (1)..(132): Xaa is any amino acid
MTMTSTLDSAVEATCPVTDTTFHLMVNPLSGGGSAAHAVVPVARHLHDAGANVTITYSQSPAKTNAIVPGAVERGDIIVAVGGDGMVASLAGAVAQAGGTFGLAPAGRGNDFCRQMGLPRDPAGIAETLLAG

SEQ ID NO: 106615 - protein, 262 aa, Unknown
  Obtained from environmental sample
  misc_feature (1)..(262): Xaa is any amino acid
TDDENLLVIGKIKDTGIVQKNNNYSININALVRHSLIVGGTGSGKTTTCKTIINNVLDRKIPVLIIEPAKDEYISWAIKRKKQGKDINIFMPGVNMFEGERIPQLKLNPFQPAAIKGADIDMMTRCEQFTSLLCSSLPASDVLPVLIDETIFSYLEEKLGNDFLQGAMKQQAQYPKLDGVKTTAQKILKERGYTGETTSQFTAALETRFSYLVRGKRGEILNISNSTPWEDLFNKTTVINLSKIANPRDRALIMSLLMLALY

SEQ ID NO: 106616 - protein, 265 aa, Unknown
  Obtained from environmental sample
  DOMAIN (5)...(134): Histidine kinase-, DNA gyrase B-, and HSP90-like ATPase
  misc_feature (1)..(265): Xaa is any amino acid
TVADDTYKSLNFDPRIDISFNKEAKTLTVSDNGIGMNEADLIDSLGTIARSGTRAFLEKLAEDAKKDSNLIGQFGVGFYSAFMVADKIEVISRKAAEDSAWKWSSDGKEGFEIERANEGRDTQGSTIILHLTDEGTEYANRWTIEDVIKRYSNHVAFPIYLTYDEKEWDDKGNEKGSKIKTDRINSGTALWRRAKSELKDEDYNEFYKQLGHDSDAPLHYIHTRAEGSLEYTTLFYIPKKAPFDLYNVDYKPGVKLYVTRVFITD

SEQ ID NO: 106617 - protein, 66 aa, Unknown
  Obtained from environmental sample
  misc_feature (1)..(66): Xaa is any amino acid
MALIACHNAGFAYDGAPAVSGLNFSVGVGDYLCVVGENGSGKSTLIKGILGLLSPCGGSVVTGDGL

SEQ ID NO: 106618 - protein, 285 aa, Unknown
  Obtained from environmental sample
  DOMAIN (65)...(281): N-acetylmuramoyl-L-alanine amidase
  misc_feature (1)..(285): Xaa is any amino acid
EAAFFSGREGDNGIVLLDHNDVLFVPLPYLDKGNLKFPEAFVTQVKTALNLNAVEERYSFRIAAIIVDPGHGGRDPGASWEHNVNGRTIKSVEKDITLKVSKQLYASLKAAFPDKRVLITREGDTNPSKDARVDLANSVALADNEAAIFISVHANSSFSKSARGYEVWYLTPSYRRELIDRSKYPDSGDVIPILNSMLEEEITTESILLANSILKRLGETLGKSMPSRGLKAEEWFVVRNARMPSVLVELGFVSNEADALLMNDEAYLKKLSDALYKGISDFIAF

SEQ ID NO: 106619 - protein, 282 aa, Unknown
  Obtained from environmental sample
  DOMAIN (93)...(263): Phosphoribosylglycinamide synthetase, ATP-grasp (A) domain
  misc_feature (1)..(282): Xaa is any amino acid
MQGPALRIAGEMGLETVAADADPEAICVPLAGRFEKVDLKDKKGIEVLARSLAEEGGLAGIVTAGTDFSASVAWAAERLRLPGISHETALDASDKERMRKRFKAAGVPSPEFIILKHPPEDGSALPFSFPVVVKPVDNMGSRGCRRVNGGPELKAAVAEALGFSRSGRAIVEEYMEGPEFSVDALVCKGEITICGLADRHIFFPPYFIEMGHTMPTSLNPAVVASLLEAFCRGVRALGIDNGAAKGDIKLTPKGPMIGEIAARLSGGYMSGWTYPYSSGVFP

SEQ ID NO: 106620 - protein, 264 aa, Unknown
  Obtained from environmental sample
  misc_feature (1)..(264): Xaa is any amino acid
VTEEAELTEGWTGIRMTSESSELIGNVSRLARVGEDRRVEEKTYFSFVSGNLIHSVRAGGPSYYEIPGVIIQKSAPNGLMPLIRKSENDGTDEAWSGSIGYESSKPLGDLKDKVKNVGQSNGSLNLNISAGGNQGTNRGESWMYQAVQSVSGSGIADILQTVGNSIKVISGSRDGFTDEYTIEGVKDISRNGNYGDMKGGNIGAGGAVKKNHSASGRLIGTSISAGGGGSLSTGSTWQTAGFIDVNGDGLPDYVNGGKVALMNL

SEQ ID NO: 106621 - protein, 83 aa, Unknown
  Obtained from environmental sample
  DOMAIN (28)...(61): Tetratricopeptide repeat
  misc_feature (1)..(83): Xaa is any amino acid
ALTYQSKKDYDRAIADFTRAMQIAPDNKNFYKYRGDTYMEKKDYNRAIADYEAALRIDPGDVNIQRDIQRAMQELEGKAVSRQ

SEQ ID NO: 106622 - protein, 255 aa, Unknown
  Obtained from environmental sample
  misc_feature (1)..(255): Xaa is any amino acid
VLTPNETVELFQIIKRFAASGKSIIFISHKLNELMELSDRITILRAGKVIDTVRTDETTPQELSYMMVGKKLDMRLCRNNEPPGGVVLKVKDFVVKSLGGAVAVDHLSLDVRAGEVYGIAGVDGNGQSELVKAICSLAPREGGELIINGTELRLMCSPSVVLACGVAHIPEDRQRIGTAMAMSVAENLILHNIDRPDFRSYKLLDWKKINAYAESLVSKYDIRTSGGKASISSLSGGNQQKLIVAPRLEQSPKLL

SEQ ID NO: 106623 - protein, 271 aa, Unknown
  Obtained from environmental sample
  misc_feature (1)..(271): Xaa is any amino acid
TIDLAILKIETDTKLPALRLGESGILKVTDPITVYGTPRGREVLANSAVGGIISKISTDSYGIKTIIHDARTSPGNSGGPIVKGNADEGFAVVGIENSSCDDTGLSGGIPVEYLYDILRSGDLGLTVQEVNDAKTYYVKTGDAYFMGGDMRKNSAIGVRLYENDTDRLLYDATDAENHLKDLYLRVDKKYNYSTIAYTDDNLQDISRITRIYGIADPYYWFGRDIKTSSYKVEKSDSESPKNKGDSVPEDSVRYETQYYAHGTGKGLSYFP

SEQ ID NO: 106624 - protein, 226 aa, Unknown
  Obtained from environmental sample
  DOMAIN (81)...(226): MatE
  misc_feature (1)..(226): Xaa is any amino acid
TPFKAIGMANMINIILDPLFIFTFGWGISGAAIATWVSRIASSIYLFHRMKASSSIVISPRLSFRDQLTTHWKGILWIGIPVALTTVNIALGMGSVNKILSSFGHRAVASWMLGLRVEELAFNFVMGITSALVPFIAFNYGKRDIERMLSGFKAAYLIALVLMCSMGTIIYCYPEIFLGLFKPLPEIREMSIRAIRASVPAYPFGSFVAISCAFFTGSGYSIFGTL

SEQ ID NO: 106625 - protein, 291 aa, Unknown
  Obtained from environmental sample
  misc_feature (1)..(291): Xaa is any amino acid
TGIDLGDLDGQVSADDLVKSADKDAFEGFDPLSGVGQDKASGEAAADNIDTLDDIDDFSFPDLDNALGESPKDKKAPAGKAGKAGRRKDKQKGEIPIPEDEKDIELNDSELGYLQETLAGYPLNLRIACEEIIAEQDVRPEQMVRLIRNLIRGAPARETAQLASEILERPITIPKGFEKSSVEALEAEKATFAYIFIHNFLPVLRLVALLAIVAGSIFYLSYKFVYIPLKAESIYKMGHDLIPKGEYQRANERFSEAFNIHRKKDWFFKYADAFTKERQYIYAEQKYDELL

SEQ ID NO: 106626 - protein, 214 aa, Unknown
  Obtained from environmental sample
  misc_feature (1)..(214): Xaa is any amino acid
VAPSEDDSYFPPDELLSDLPDKLEPVPPTDSLEGDNSGLENLDNLENFNFPEASAEPEGIDSEPALADAPSPEDMSSKEDIGGALDLSVFDDLGDFGDLGLPKEPAAADSGETSDLDDLDAFGDLGLPEEPAAADSGETPDLGDLDAFGDLGLPEEPAVADSGETPDLGDLDAFGDLGLPEEPAAADSGETPDLGDLGDLGDLGLPEEPAAADS

SEQ ID NO: 106627 - protein, 299 aa, Unknown
  Obtained from environmental sample
  misc_feature (1)..(299): Xaa is any amino acid
TTGKITVSGTAKITSANAADVGGTIFFFNASTGTETDARLVISGGTVENTADSAYARAIYNNSPNEITISGGTVSAKTGRAIHNGNAGKITVSGTAIITSANTTAAGGTIFLAKPTTDNTNTRLEITGGTVENTGANGRVIYNDSTGAVIISAGTVRATGTGTVYSVYSANTPTAGALSMNFTTAPTAVVIGNTYPKLFTAAPVLTLTPGSGKIDYVWTATTPAADNYDLYWKAGVLSAADVKTGTRIPNPPANGSLTGLTNSATYTVIIAASIKTAAGIDTIETAPLAAKPDTPLYII

SEQ ID NO: 106628 - protein, 269 aa, Unknown
  Obtained from environmental sample
  misc_feature (1)..(269): Xaa is any amino acid
YTYGSTVFYHNSATGTLTISGGLISISTGNSSSYAVSNNAGGTVNILGGTISSGAGRVVHNNAGGTVNISGGALSSYTGTTVLNNAGGTINISGGTIQATSTGTAVSNNGAGTVNISGGTISNTNSVAGSTAVNNSGTGPINISGGTISSGAGRAVYNSNTGKITVSEAAGATTLITSGNADTSQGTIHIAGSQADTTERFEMTGGTVQNSANTNGASVIRNDSAGSASITGGTVSKAGTNGNYAVYKGGTGDVTVGPGVTIVGNNYGL

SEQ ID NO: 106629 - protein, 242 aa, Unknown
  Obtained from environmental sample
  misc_feature (1)..(242): Xaa is any amino acid
VTPPTGPLYEPSVQYNFFSPKTEDELRGAVCRVRVGDDGLVDDESQYRYLPAANYGYLIARTRANFDPAAFGMHGLEVLSSFSANGAKYFYLHKDSDLVATMKQVGKLSGVMYIESDTMNYTTGTGPFEYRPGDTYVNNEQQYGVLTTMAKKAWETYGFGPHRPTVANFDTGVRWSHNDLKGVVKHAFSWYGSASGSGLVTNIGALSPLSDPNPPDRMVTDPDLLSTDGHASGHGTHTVGSS

SEQ ID NO: 106630 - protein, 68 aa, Unknown
  Obtained from environmental sample
  DOMAIN (1)...(68): Histidine kinase-, DNA gyrase B-, and HSP90-like ATPase
  misc_feature (1)..(68): Xaa is any amino acid
VTDNGPGISPMDSPRIFERFYRSQSVRGVPGTGLGLAIVKHLSRIMGGEVSFESVPGKETTFFVRLPL

SEQ ID NO: 106631 - protein, 241 aa, Unknown
  Obtained from environmental sample
  misc_feature (1)..(241): Xaa is any amino acid
MKTSRFLSLAAAFSLFSLFSCTSDVEPPPLPEGSSSSVVTSDTFTDSRDNKSYKWVVIGTQTWMAENLNYEVNGSKCYTNLEAYCGIYGRLYNWSTAMAIDSTYNSTSYSATAKHTGVCPSGWHIPSDAEWGTLMKFVNPNCSLTSDDCDFAGMLLKDSIGWNSGNGTDAYGFSALPGGYGDSDGSGSFKGIGTDGNWWSTSEVNSNNVYYRTAYHNSNRIGRYNYSDSKSGLRSIRCVKN

SEQ ID NO: 106632 - protein, 276 aa, Unknown
  Obtained from environmental sample
  DOMAIN (51)...(106): Bacterial Ig-like domain (group 3)
  misc_feature (1)..(276): Xaa is any amino acid
GTLAVGTSTITVTYEGKTTTFTVTVTAVGSTEPTLTGITAVYSGTAAIYPTTPLDDLKTDLTVTAAYSNGTNQTVTEYALSGTLTVGTSTVTVTYQGKTTTFDVTVTLPGFTTAPVLSLDPGYEEIAYTLTASVPAADSYDLYYKEGSLNASLLKSTGTKITVVAGSDKITGLTNGTEYSFIVTANKAGYTSVDSVVEEATPADLYYVISGSGSAFSATRNGAALGTTGAIQTVINAIRTNAAGAPCIIQFGAEGATLSTGSTAVSLTTQAAHGAR

SEQ ID NO: 106633 - protein, 89 aa, Unknown
  Obtained from environmental sample
  misc_feature (1)..(89): Xaa is any amino acid
NLLVSRSEDGMMLLSVEEAEPVLLSSQTRAVFDVSGAGDTVVAVMAAALALGAPLAVGARLANLTAGVVVGKVGTATASPDEIRAWAMD

SEQ ID NO: 106634 - protein, 261 aa, Unknown
  Obtained from environmental sample
  DOMAIN (153)...(260): UvrC Helix-hairpin-helix N-terminal
  misc_feature (1)..(261): Xaa is any amino acid
MAVLHFRDGLLMAARNFLFKRDKWEFSSEGNDGIVTQFYMLEDMEIPEEVIVPDGAGFSQAVLQNWFDIRGENTDGIEGINSMDNVNNIVSVDNISNPNQQNDHQQKHERVNVSVVIPQKGAKKLLVSMAEKNAHAYLLQKSPPNASQDVDDLQKALSLPRAPVVIEAFDISNLGESFAVAGMVQFRGGLPNKSAYRRYKIKTVEGQNDFAMMMEAVSRRLRRLQNEGDAFPDLLLIDGGKGQLHAAMEALKDFENPPLIA

SEQ ID NO: 106635 - protein, 190 aa, Unknown
  Obtained from environmental sample
  misc_feature (1)..(190): Xaa is any amino acid
DSINIGKGITHIELSTFENSELTSINIPDNVTGIGRSAFKDCKKLVSITIPDSVKSIGVDAFKGCTSLAGIIIPESITDIEWGTFESSGLISVFIPDSVINIWNGAFRFCNKLTSVTIPASVKKIEGSAFYPCVNLKSVTFEGLIERSGIDSAAFSGGLLSRYMEPDGGIGTYTTREIHPATGVSYWTKQ

SEQ ID NO: 106636 - protein, 208 aa, Unknown
  Obtained from environmental sample
  DOMAIN (25)...(178): AIR synthase related protein, C-terminal domain
  misc_feature (1)..(208): Xaa is any amino acid
VAKRMEIGAVVGAAPKARVRREEPTPGDLVVLIGGPTGRDGIGGATGSSKSHTETSIEQCGAEVQKGDPPMERRLQRLFRREEFSRLVKKCNDFGAGGVAVAIGELADGLKIDLDVIPKKYEGLNGTELAISESQERMAVVIAPSDLAALKSQADMENLDVTVVAEVTDAKRLVMVWRGETIVDVSREFLDTNGREVVCKGPALRPRP

SEQ ID NO: 106637 - protein, 256 aa, Unknown
  Obtained from environmental sample
  misc_feature (1)..(256): Xaa is any amino acid
MILAFVTMGIADLSQGAGKLLGMTAAISYASTLIAGSGAYIIASNLFPNFMNSAAMEKIPKDAEAGMLKAYFTMQLPPLLDVMSAIVTAFILGLCISAMRGKTNTGDILHKGFSEFSSIISTVLHNAVIPLLPMYICGTFVNMTVSGETFVILGVLWKVFLTVIILHLIYITIMFLASSAVTKKNPFVMMKNQIPGYLSAIGTQSSAATIPVNLTCAEHDGVSKEIRNFVVPLCSNIHMPGSMITITCCVTAVLLM

SEQ ID NO: 106638 - protein, 154 aa, Unknown
  Obtained from environmental sample
  misc_feature (1)..(154): Xaa is any amino acid
MNISVNAFGEFWRKRELIGLIARNMWATGDPGLLFVDNMLKYSPLRAEDEPRFSNPCGEYLASAGSACNLITVNAARLAREVFDELAATPSAPAWSGDQAYSDEFSRRFWRRLAETSGLACFLGNMVLGCDQGYPLEEIRRKTQALKPGGRGPE

SEQ ID NO: 106639 - protein, 288 aa, Unknown
  Obtained from environmental sample
  DOMAIN (1)...(288): Inner membrane protein CreD
  misc_feature (1)..(288): Xaa is any amino acid
MAAWGGQFTLYGPVIRIPLVEREEIRTKTDKGGERIETVLHQNALWLTPKDVNIQPDVSTQKKRRGIFSVALFSGQVSISGNFTFERVKDELKPNQTIYPKQAEIIVGLASQKGIRVIKADWNGGELFFRPGNRNFSLDGLPYGINATSPFDPAKLNTFDIQLAVQGGKSMRVLPIGEVTRARIQAAWPSPSFQGGFLPTTYAVSENGFEAEWEIGYLSRPIPLFWLTKEKSRPDSEIYFEGELFGVDFFKPLDHYALNERAVKYAVLFLVIPFLTLFFLEVFSQKSI

SEQ ID NO: 106640 - protein, 79 aa, Unknown
  Obtained from environmental sample
  misc_feature (1)..(79): Xaa is any amino acid
VEKRAAAINTDKQDKPKTTKGADGGKASKRPPEVGAMEEKFIGRLGTKVVIEGDANKGKIHIDYYSMEDLERLYEILGG

SEQ ID NO: 106641 - protein, 241 aa, Unknown
  Obtained from environmental sample
  DOMAIN (16)...(211): Type III restriction enzyme, res subunit
  misc_feature (1)..(241): Xaa is any amino acid
MKKEDTSGQVTVSTVKKIAAYHQYYAVNKAIASTLKAAARDDEKKGKGGVVWHTQGSGKSLSMVFYTGKIVVSLDNPTVVVLTDRNDLDDQLFDTFAASTQLLRQEPKQAGDRKELKELLKVASGGIVFSTMQKFQPEEGNVYEELSKRRNIVVITDEAHRTQYGFKARNVDVKNVSGKVIGKRTVYGLAKYLRDALPNAVYLGFTGTPVEKTDVNTPAVFGEYIDIYDIAQAVEDGATVP

SEQ ID NO: 106642 - protein, 287 aa, Unknown
  Obtained from environmental sample
  misc_feature (1)..(287): Xaa is any amino acid
IWVGSEAKTFYQNKMDEWVAAYNAANSKPFPWTVIVESVDSGAAASKFLDDTAAGADIFTIPHDNLGKLIAGTSAIGPITNEKLLAQIANDNPAIFFDVIKGKVGDPGVEYTFGVPYIAQALVLYYNKAYFTDEDVKTWEAMWAKAKANGKQAVTVNGDDGYNNSFLVLATKASDGTHAVDIYLDQKLENCNFHSDLAVAVMQWGQRFFTDGSPDGRVIYGAKKVSDSGWEVELKNEVSLSLIGGAWNFNAARAALGSQLGIAPLPNFTLTTSDVARTNILANTVMR

SEQ ID NO: 106643 - protein, 106 aa, Unknown
  Obtained from environmental sample
  misc_feature (1)..(106): Xaa is any amino acid
MTETKKSIPEERALKVHYRSQKTINAVSLTATYVVLIILALMWLYPILWIVLNAFRVEYNDQGDLIGIVVSHYFPKSMGFENFKRLFINTSFGKWVRNTLIVAIFS

SEQ ID NO: 106644 - protein, 97 aa, Unknown
  Obtained from environmental sample
  DOMAIN (1)...(88): FabA-like domain
  misc_feature (1)..(97): Xaa is any amino acid
FPRIPRGAEGVILVETMAQSGGAGLRKLGTLGDGALFFLASVDKVKFRRQVKPGDEVRSEVENLRVSPRMVKQSGKAYVGDELAAEAEWMCLIGNGD

SEQ ID NO: 106645 - protein, 179 aa, Unknown
  Obtained from environmental sample
  misc_feature (1)..(179): Xaa is any amino acid
MIIVGGHGLIMPESNKNNNSGWGFNIKIKNLKKINIPVIFFSIGYNVFRNNDKFIPVFKKHIEECAGKALFFGLRNYGSINEVKKYLPENLQQRIRYQPCPTTVIGLFDREISEIPSEKINKIAIVVAFNKIEYRYNGNLKIILEWLINYAKYMQRNGFNVDFYGHHLFDTHGKYAKYV

SEQ ID NO: 106646 - protein, 64 aa, Unknown
  Obtained from environmental sample
  misc_feature (1)..(64): Xaa is any amino acid
MSCYFGRNGIANSADLCTYFLEKAGVALVPGSPFGDDACVRFSYAVADDELEHALKDMEQVLPG

SEQ ID NO: 106647 - protein, 169 aa, Unknown
  Obtained from environmental sample
  DOMAIN (5)...(169): Carbohydrate kinase
  misc_feature (1)..(169): Xaa is any amino acid
MPEIMSFPLGRGRSWKNALDEGAVDELPSLATKASALIVGPGMGRSPEAGTLLSALLRLPRRPPMVLDADALTLSAEGKLSLESLHAGDILTPHPGEAGSLLGVDARRIQEDRFAAMRELCALHPALWVLKGAGCLIGRQGEPVLIAPHHVPCLAVGGSGDVLAGCVGS

SEQ ID NO: 106648 - protein, 183 aa, Unknown
  Obtained from environmental sample
  DOMAIN (2)...(180): Predicted permease
  misc_feature (1)..(183): Xaa is any amino acid
MIWPLYSNLDSGFSVYTWKDLMRSQYSSYESTRQLLLLIMALIVIVAAVNVSSATSMLVIERQRDIAVLKVTGASAKGIKDIFLWGSFLTGLCGAIIGIAAGLLLGNFINPVIRSLEKFFSFLSGLGGGSEVKILDPGFYLETIPIIIDWQTVFLIGCFTVLCSVIASWLPAARAGKMKPMEL

SEQ ID NO: 106649 - protein, 241 aa, Unknown
  Obtained from environmental sample
  misc_feature (1)..(241): Xaa is any amino acid
MDCSFCSFKNRDKRQQLSYENVTDIVNIFISLGMEALTLTGGGEPLCHPDIKKILLFCKERNVKTGLITNGFLLDKLDKESLEALTWCRISFDDDKTDDDVETITKLLNKIRQKTPSDEIFWSFSYVVMEKQKPEIQHKIVLLAKELNMQNVRFVPDQINTLKVDLDLTIANNHENNKRPICIYDKKIHEKAFPRCWLYLIKPFIAADGYVYPCCCIEYKSDNMDFTKDERICYYKDMKKN

SEQ ID NO: 106650 - protein, 265 aa, Unknown
  Obtained from environmental sample
  misc_feature (1)..(265): Xaa is any amino acid
MSDYSHINVSESMGYGMLMMAYMSGSEKKLGLKKNDWIFGCTSLKEYYDAMLRTVLEYPSVIAPNLFTWQLHGYTDRGTKYSEFIGDWESEHDGYTGFAINKNGLKTAPFTRDPEDGDSATDGDMDIIYSLIIADKQWGSNGRYNYLEIARSMLADFWQYCVHPVYKTLLLGDWASKGGDKGDPTLAAIQMNATRPSDFIISHLKAYKAVDSAHNWQEVIDATYGVIKDVYADVKAKHGTSRGLLPDFVIRNDADTAWVVPDGHV

SEQ ID NO: 106651 - protein, 243 aa, Unknown
  Obtained from environmental sample
  DOMAIN (90)...(243): DNA gyrase B
  misc_feature (1)..(243): Xaa is any amino acid
GQEFTKGNPIAPQYEIGTARMEEHGTTIEFYPDSSIFTETEYNYETIATRAREFAFLNKGLTLVVSDERTISSEPEGCALKKEEFYYPGGLGSFVEYIDQNRKPLFEKPIVISTEAGSYPLEIALRYTESYTDNLFSFVNNVNTYDGGTHITGFKTGLTRIIVKHATGKVSKPKKDVEITGADVLEGLTAVIAIKIPQPQFEGQTKRKLGNSEAKGGVEAAIFKALDEFFIENPGITKIIAEK

SEQ ID NO: 106652 - protein, 249 aa, Unknown
  Obtained from environmental sample
  misc_feature (1)..(249): Xaa is any amino acid
MAPGTTMGAAAPVVQGAGGEMEGAGEKSVAAVRSQMAALAEKNGYPVGLALAMVDYDVELWDVTVNGQTRALTLTELERLEKEGASGIERVGIISPVGKLLSLSAGEALRYGLASGLVENQDALLSAINFRGDIVESSPSAADFIISLLTSAPVQTILILLALVMIFLEIQTPGFGIPGITAVISFLVVFGTSALLGRVGSLEIIILLLGLGLLAVELFVIPRFRRSGHFGLYLYWYFPGAVHAGFWIP

SEQ ID NO: 106653 - protein, 75 aa, Unknown
  Obtained from environmental sample
  misc_feature (1)..(75): Xaa is any amino acid
VKRTTDRIMEFAKALAGSGASEKTIDNLRKGVQAGFDAVSKMYGGFEKLPQVSKDTYAAVMKEFDNWALGAEAAG

SEQ ID NO: 106654 - protein, 235 aa, Unknown
  Obtained from environmental sample
  DOMAIN (124)...(161): WD domain, G-beta repeat
  misc_feature (1)..(235): Xaa is any amino acid
AASTGSASGETKHAGSSKAGSGAKAKTEERGLEVEELPQIAADIEVFPQTGSGSTWCVAFSPDEKYVAVGSNVIKIFDMESGRELRTLLGHTGDVQSVVYSPDGKYIASGSSDRTIKIWDAETGQEQRTLLGHTDIVFVVAFSPDGKYIASGSNSMIKIWDAETGQEQRTLLGKMGAIEALTFSPDGKYIASGDGSGGDNTIRIWDAENGQEQLTLTGNNYRIIAITYSSDGKYI

SEQ ID NO: 106655 - protein, 238 aa, Unknown
  Obtained from environmental sample
  misc_feature (1)..(238): Xaa is any amino acid
DDAKKRLIRWGNFNIPVDGDGKTLLRFKGDPITGYSRYPLALVLQSADYAAGKTTVAPKDLLDPKDFKDAYVFVGVYAPGLFDIFPSPISPTYPGMGVHITMLDNLLMGDFITKAPDWVAAIIIAAAVILMVALVLYSGRIVATVGGLVLSFAIIVFAGFLAFYLGWWVPMAAPIVATLVSYLTSTLYSYATEGKDKRFIKNSVFPYPLSQSYRSDYRRSFPIEAGRGKTKEVTAHFY

SEQ ID NO: 106656 - protein, 223 aa, Unknown
  Obtained from environmental sample
  misc_feature (1)..(223): Xaa is any amino acid
MNNGKNDFPSVLFIDPFGYKAIQTSILAEFLKFWGNEIFLFVNTKRIHPALENDKFEPLMKDLFPTTLDNIKDNRKYKSTVAERLQLIIDSLGQEYQNILKENVYYTAFKFQEEDIDATSHYILHFTKGDRGFDLIKTTYNDFANVGTIFDGVNTYTFDAKKIDNKHEEFFDLDDENINKLKEKLLIIYANKTITANDLFEDHHPKTLYSRKHYTEALRKLVS

SEQ ID NO: 106657 - protein, 222 aa, Unknown
  Obtained from environmental sample
  DOMAIN (61)...(128): Bacterial Ig-like domain (group 3)
  misc_feature (1)..(222): Xaa is any amino acid
MNVLNSAVSSAQAVYDNEEASQAAVDTAEAALLAATKTFNGQKKAGSKTGAPDLTGITISAPPSKTEYYIGDTLDLAGLTVTAAYSDDSSKVIPAGELTVSGFDSSTAGSKTVTLTYNGKSASFTVTVYPAAPVFTSIAAFEAWLSAQPENTAAAAYRARLNVSDLGGYSSTAGSLGSVLRANDAKYVSLDLSGSTFTSIGYIAFQACTTLTGITIPNSVTS

SEQ ID NO: 106658 - protein, 252 aa, Unknown
  Obtained from environmental sample
  misc_feature (1)..(252): Xaa is any amino acid
LKPGRISGDTHLWQVWHGMEPIEAFRKYPTRFCSEFGMESMPSTHTVRLFCSDASPGLFDAVMKLHQKSKGGNEKILFYMLAKYRNPTLFEDFIYLSQLVQANTVRFATDCWRRNIGRQNGALFWQYNDCWPVASWAGIDYGKQYKAVQYHARHFNKMICLSNDYYSDRAELYVINETASSFSGVLEWTLRDFMGTVHSSGRESAELGYVASKRVAMLRYSEICKGVTNDKAVLTAVLKRGSEAIDQKNWLL

SEQ ID NO: 106659 - protein, 123 aa, Unknown
  Obtained from environmental sample
  misc_feature (1)..(123): Xaa is any amino acid
VTSSTPELPPWLADCLVSDDDLAQAYETTAPKLHASCKHTLSVQHAFFGEAPDWEEHGLSHAAHGFHVRAHGRPADWTLVIFDADYASAPRLLAAVMPALLARVPLVLCASAPGSARPELLCA

SEQ ID NO: 106660 - protein, 247 aa, Unknown
  Obtained from environmental sample
  misc_feature (1)..(247): Xaa is any amino acid
CTIEEREEYEPHIDNGFIIYSGVDYEQILREAEKEADVILWDGGNNDLPFYACDLHIIVADPHRPGHELMYYPGETNFRMADVIIINKCDSVKNEVDIKAVEANAAKVNPKAVVIRANSPVTIEKPDMVKGKKVLVIEDGPTLTHGSMSYGAGVVAAKNGGVAEIVDPTPYAVASIAATYKKYPNAKGILPAMGYGDKQIKDLEATIDATPCDVVLSATPIDITRVLKVNKPMVRASYELVEVKPGQ

SEQ ID NO: 106661 - protein, 182 aa, Unknown
  Obtained from environmental sample
  misc_feature (1)..(182): Xaa is any amino acid
MCHRSINYIAEMMKTKYGIDWLKVNFIGIGATCKSLREIAKYFNDPALTKRVEEVIAEETQAVSEDMEYYKSRLTGKTAGIFSGGSRSHHYQVLLEDLGMETVIAGYEFAHRDDYEGRDIIPQIKEDADNKNIESITVTPDAKFFRETYTKDQISALRKDIELDTYDGMIPEMGAGGVVLDD

SEQ ID NO: 106662 - protein, 193 aa, Unknown
  Obtained from environmental sample
  DOMAIN (7)...(193): tRNA synthetases class I (K)
  misc_feature (1)..(193): Xaa is any amino acid
MSENNAQHWADLIAERIVREKGDKDIYTLASGITPSGTIHIGKFREVITTELVSRALIRMGKKVRFIYSWDDYDTFRKVPSNMPQQEMLKEMLYQPIVDIPDVLGTESSYARHNEVTLETVAPVLGISNIEFIYHSQMYRSGAYNELIIKVADSNEKIREVLQQFKTNDIPENWFPIETYCRQCNRDRVTFSN

SEQ ID NO: 106663 - protein, 250 aa, Unknown
  Obtained from environmental sample
  DOMAIN (65)...(250): Queuine tRNA-ribosyltransferase
  misc_feature (1)..(250): Xaa is any amino acid
MMRPGGDLVQQMGGLHKFSGWRGPILTDSGGFQVMSLAGLTKMSEDGAQFTSHIDGGIKHFLSPEKSVQIQHQLDSNITMVLDECLKLPADRARVEKNVDMVTRWAARSRAAFVDRPGYGIFGIVQGADFPDLRARSAAALTDIGFDGYAIGGLAVGEPQNVMFDMIAATAPLLPPDRPRYLMGVGTPIDILGAVERGIDMFDCVMPTRAGRTAQAFTRTGTLNMRNAKFRDDAGPLDPECKCPACRLSR

SEQ ID NO: 106664 - protein, 245 aa, Unknown
  Obtained from environmental sample
  misc_feature (1)..(245): Xaa is any amino acid
AQRLKINYSGLEVSVPYIRIDRAAALAETEAEIWGMITDRSLDVFLRGSAGFNSTETWLGLFRNFKFLNALVTVESASYSEITADKPFMFSFDCHKEEAGLSMSLSGGPKDMLRFRLNPESDGGGVFYAAFSQPSPVRGAITGFIGKDSIDAQSSDLYVDLGSLWRFFPSNDAIGFSGGIVTASIRVTGSLEEPEFYGTARGTSVRIDVPQFLPETIRPVPTTFTFSGNEITFGPVDAIIGKGGG

SEQ ID NO: 106665 - protein, 241 aa, Unknown
  Obtained from environmental sample
  misc_feature (1)..(241): Xaa is any amino acid
IEYYTPAVAHYTITGIGTFTYDGTERTVSITRKESASLGEFTILYRGTETPPVNAGTYPVTINVEAVPYWNAASLSAGNIIINKAAGAVVGAPAGTSSVASNSITINEVAAPDNGQTVEYAGSTSTTAPSYGWQDNTTFSGLIGGTTYYFFARSKGNTNYNAGTASARLQAATPKGAGAVVSAPTLASSTPTSITIKAVASGNGQTVEYARNTTNTVPSSGWQEGVTFSGLSIETTYYIFA

SEQ ID NO: 106666 - protein, 205 aa, Unknown
  Obtained from environmental sample
  DOMAIN (4)...(204): Type I 3-dehydroquinase
  misc_feature (1)..(205): Xaa is any amino acid
VAKICLCMTAKTLRRNLEILDKYRKYTDMAELRVDCLDPDERLMIRRFPEQAGMPVILTIRRDIDGGSFVGGEGARIGLMARGLAYAEADRRRNFAYLDIEDDLNIPSLEEAARTFGTRIIRSYHNVKGTDADLSAKIRSMRRTGDEIVKVSVAANSTRDVLKILSAGKECEGQEKILVGMGHFGIYSRILAEQFGSLLSYCSAL

SEQ ID NO: 106667 - protein, 236 aa, Unknown
  Obtained from environmental sample
  misc_feature (1)..(236): Xaa is any amino acid
SWVPGNILSQYYERTFNNFRAQGYDPNDRWISYYVWKQAYDRAVIHTAILNMMKKSGYTVSEKAVNKAVLQLPQFQDNGRFSLILYNRMTDSARTALWNQTQEEIAMNTFFSDYFSLLTPESEAKFVASMASPTRNFDFVSFNVDNYPESEYLAFAEENSKLFDSIQLSRITISSSEREARKILSSIKDGTITFEDAAKAQSKDNYADRGGDMGVKFCYELDNEISNQADREKIYS

SEQ ID NO: 106668 - protein, 87 aa, Unknown
  Obtained from environmental sample
  misc_feature (1)..(87): Xaa is any amino acid
MIQSLKLLQVNTLELEQMLQSELEQNPLLELDKELAADAEIDAAERVTGDGEVQEGEEKEKESGDGADDYLEELTGSGDDDSGIDWE

SEQ ID NO: 106669 - protein, 234 aa, Unknown
  Obtained from environmental sample
  DOMAIN (1)...(233): Aconitase family (aconitate hydratase)
  misc_feature (1)..(234): Xaa is any amino acid
TGVGSTDMAYGMVTGKSWFKVPDAIKVELSGKLNPFITGKDLILFIIGMIGVDGARYQSIEFSGPGVAELSIDHRFTICNMAIEAGAKNGIFPMDEKTREYLKGKISVPYVEISADADAGYSRVIKIDLSAIEPLVAAPHLPSNVKPVKELVGLKIDQVVIGCCTNGRLSDLMQAAEIIKGKKIAPGVRCIVIPATQKIYLDALREGLIEIFIEAGAAVSTPTCGPCNGLHMGV

SEQ ID NO: 106670 - protein, 221 aa, Unknown
  Obtained from environmental sample
  DOMAIN (1)...(221): Protein of unknown function (DUF453)
  misc_feature (1)..(221): Xaa is any amino acid
YRALVKIVEPVTTVRIFNTNTGKVFEADVTIVEGRPAVFGDYKVDGVPGTGAKISLNFAGTVGSKTGKLLPTGNPKDMIEVEGFGELSVSMVDAGSPMVFVLAEDLGLKGTESPKEIDSNPEMLKLLEKIRCVAAEKMGIASRAEAREKVRAVPMVAFVSPPQAYKSHITAEEVKADDVDLVSRDMFMQIMHKTYSGTATVCTGCAAVTPGTIVNAVMRKN

SEQ ID NO: 106671 - protein, 250 aa, Unknown
  Obtained from environmental sample
  misc_feature (1)..(250): Xaa is any amino acid
SASDTRLPSTNTRTIQLRRNEAQEAIARIKLQAEQEEQKVLAEQKKVLEEQQRQLAEQQREQQRLLEEQQKQLAEQQRQREEQERLAKAQAERERAEQTRQVVQRADALLIGGKYADAIARYEEAIAMEGLNRAETTETNRLIAEAKALQAEMDKYNRPLQDSDFEVAQSGNIITITKYKASTSKTITVNGNNHTVYFGIVNVNIPQRVFGQNLSIIGPEAFKNCGIQSLVIPDTVTEIGYGAFANNNLE

SEQ ID NO: 106672 - protein, 166 aa, Unknown
  Obtained from environmental sample
  DOMAIN (2)...(135): GTPase of unknown function
  misc_feature (1)..(166): Xaa is any amino acid
MPVCAIVGYTNAGKSSLLNVLTGADVLAEDKLFCTLDAVTRRFQSAGGTAVLLTDTVGFIRSLPHSLIKAFHSTLEEAALADILIHILDASDPDIENNYETTINVLRELSETKEKNAAEKPSIDIPTITVLNKIDRLSNEAVEELQNRFPDSIAVSIKDKIGLDAL

SEQ ID NO: 106673 - protein, 95 aa, Unknown
  Obtained from environmental sample
  misc_feature (1)..(95): Xaa is any amino acid
MEKKPVLIVIAGPNGSGKTSITSKILKHEWTELCVYINPDLLAQEKFGDWNSPEAIRKAADFAPKQRECCIAKKESLIFETVLSSPEKVDFIIQA

SEQ ID NO: 106674 - protein, 135 aa, Unknown
  Obtained from environmental sample
  misc_feature (1)..(135): Xaa is any amino acid
MTRNFTISLKNRLSLTYVLFICLVMLVLCIVINLFTNIFFSALVKKNIAAKNGEIVRIVEEQYNPLTGSFNTQTIETMGMYFVSEGFIVTVEDWQGNRLWDARSCDTRHCTGVINEITARMESRFIASGKMRIDT

SEQ ID NO: 106675 - protein, 243 aa, Unknown
  Obtained from environmental sample
  misc_feature (1)..(243): Xaa is any amino acid
AGKIEALEYEIARSEAGFLPLAILFDDCLAKGMPLINGVRYLGGTLESYGNTNTADSLTAIRETIYEKELFSLARLKEMLERNFAGYEEERKILLSCPKYGNDDEIADNMAIRIHEHLCHCARSQAEKVGLHSYLIVIINNSANTLMGRYTKASADGRKAYTPMANANNPSSGADKEGATAFLNSLVKLDTSIHAGAVQNMKFSRTLLTKHRSQFEALMKVYFEKGGAHAMLNVLSKTIWKTP

SEQ ID NO: 106676 - protein, 244 aa, Unknown
  Obtained from environmental sample
  misc_feature (1)..(244): Xaa is any amino acid
AVFAPAGDDLPPFEASFSPLHASKKNGGKLTLCILDKQTSSEIDSPDDLEGGEFERLSPVENEARYVALRIEELLKEKNETGEYKYRPGDIAILFRTRSSQRLFEKHLMLLNIPYVSEELNGFFYGGPVDDLMSVLRLAAYPKDSAAYAQMLRSPFAGLSMQGLALCVPRVAASTGIGMPTAPFSDEPLALLSEDDKDKYLHGKRIYQKILDIAHKESISSLVSELWYGEGYRYETEWNPQTAA

SEQ ID NO: 106677 - protein, 241 aa, Unknown
  Obtained from environmental sample
  misc_feature (1)..(241): Xaa is any amino acid
GAKEDGYRVLLEEGASLPAITALAWTDADSPCGWYFAFATDDGIIRVVDVFSGKPLAVFSAGEEKISALAFDRGTELLSLSESGKSVTHTLPENHASAGWEQVGGGKVFSLVDGSVCLNDSATGKEMARYYFFSKSDEWVCLTPEGFYNASTGGAARIALEMGKRRYRLDSLSGALYRPDLFASLVRKEIITKFPFTLSDLFKEDRLPPLVSRSFDENSSQLQIKVTEQKGSAGYVALYRR

SEQ ID NO: 106678 - protein, 185 aa, Unknown
  Obtained from environmental sample
  DOMAIN (1)...(168): Phosphate acetyl/butaryl transferase
  misc_feature (1)..(185): Xaa is any amino acid
MISPDGKQCYIYADVGVIPEPTLEQLADISISSAACYRHMMQEEPYVALLSFSTKGSAKHPRVDRMREALELVRARDPQLAADGELQFDAAFVPEVARSKAPGSKVAGRANVFIFPSLEAGNIAYKITERLGKYTALGPLLQGLDGGWHDLSRGCNADDVYMVALIGMALEIERQKALHAAVGQK

SEQ ID NO: 106679 - protein, 120 aa, Unknown
  Obtained from environmental sample
  DOMAIN (33)...(111): BMC domain
  misc_feature (1)..(120): Xaa is any amino acid
VVSHLVADWFVIPNIHREVIAVLAGTGPLVARQALGIIETFSAASIIVAADAAVKAATVRIMDVRIALGIGGKGYALFCGDVAAVRAAVDAGGQRASESGLLVGKVVIPRPAESFFERLL

SEQ ID NO: 106680 - protein, 285 aa, Unknown
  Obtained from environmental sample
  misc_feature (1)..(285): Xaa is any amino acid
CLDEAAACVLIVIAAFCVLLLPARTSAAAQGEEKDLSGYVDDGLKSFDFSDLDELLKGISQDGQRAFGSYDFITKLKEIVSGDIKVSYNDFFQYAVDVFFSGLFDFLPFLAGIAAVAILYSILSGLRASEKGAVKNAVYFACAGLIIVMLAALIAGAVLLITDIVSSMRTQMNIVVPILLTVMSSLGANASAAVYQPAVALLAGGMVELIVAVALPLFILSFVFDVIGGLSENVKLSNMSGFLSGCNKWLVGVSFFLFTAFLSVQGITASVYDGLSVKAAKYTIS

SEQ ID NO: 106681 - protein, 227 aa, Unknown
  Obtained from environmental sample
  misc_feature (1)..(227): Xaa is any amino acid
AKVDTRSKISEFVTRGLDDVVDTFKLQPGKYANQKLLPTTLAALVYIEEKRKVEVEALWAGDSRCYVLDANGLKQLTVDDEDSAEMITNLFCAKGKPTTLNYKNYTFSLPCILLAVSDGVFDPYSPYDNLGVEMILLDNIKKSHSVNYLYEKLKEHYDKVHSDDATMAFTPLGFDSYTHIQNVLAPRTAKVLGIWEKYQKMKSKLDIVDSQEAADDIVGKISSRTAD

SEQ ID NO: 106682 - protein, 246 aa, Unknown
  Obtained from environmental sample
  DOMAIN (96)...(246): ATPase family associated with various cellular activities (AAA)
  misc_feature (1)..(246): Xaa is any amino acid
TSRTTRRELHGIEAQNVIAALIANKCVKKSDMDEIRFAKDRLFSDISGLEKINVDESVKNVGGLGGLRSWLEEKKTLLSAEKRDEMKARGLQSPRGILLVGVPGCGKSLSAKSIAANWKLPLYRLDFATVQGSYVGQSEQQLKDALTTAENVSPCVLWIDEIEKGLSGYAGNGDGGVSTRMVGQFLFWLQECKKQVFVVATANNVSMLPPELLRRGRFDELFFVDLPTAEERREILAMYIKKYLGL

SEQ ID NO: 106683 - protein, 245 aa, Unknown
  Obtained from environmental sample
  DOMAIN (6)...(227): Elongation factor Tu GTP binding domain
  misc_feature (1)..(245): Xaa is any amino acid
MAYNTETMRNIGISAHIDSGKTTLTERILFYSNKIHAIHEVKGKDGVGATMDSMELERERGITIASAATNVTWRNHDINVIDTPGHVDFTIEVERALRVLDGAILVLCSVGGVQSQSITVDRQLKRYSVPRLAFVNKCDRSGANPYRVAQQLREKLGHNAVMIQIPIGLEDKLEGVIDLVTMKAVYFDGKNGETVRDAEIPADLLEEAKKKRDEMLDAVSMYSDELAESYLEGTETVEQIMAAIR

SEQ ID NO: 106684 - protein, 214 aa, Unknown
  Obtained from environmental sample
  DOMAIN (1)...(200): Penicillin binding protein transpeptidase domain
  misc_feature (1)..(214): Xaa is any amino acid
IDRISNFARAAGFGELTGIDLPHENRGLVPSRAWKKRRFNQGWARGETLNISIGQGATLVTPVQLASFVSSLMNGGKLLKPLLLADEPVQVRQQVPGSPDARKFIVESMRRTVEGGTARVLYRQDAVMGGKTGTAQVVKLKFAAGDRRLKTHEMAYEQRDHAWIASYGEKAGRRYVVVTMVEHGGGGSSVAGPVAKKVYDHLFSTLSTAAAGQR

SEQ ID NO: 106685 - protein, 138 aa, Unknown
  Obtained from environmental sample
  DOMAIN (18)...(137): ScpA/B protein
  misc_feature (1)..(138): Xaa is any amino acid
MEYKLEAFEGPLDLLLQLIRRNEIDIYDIPVAELTAQYIAVLHSAENMDGMSEFILMAATLLEIKSRMLLPKPPEQTGVTAEDPRDALVRKLLEYQQAQALAELLKAVTPAGERFVREVTDTRWAAAPAAEPDETLAD

SEQ ID NO: 106686 - protein, 227 aa, Unknown
  Obtained from environmental sample
  DOMAIN (68)...(103): UvrB/uvrC motif
  misc_feature (1)..(227): Xaa is any amino acid
ILKGVQKKYEDHHQVNYTPEAVEAAAKFAQRYITGRQMPDKAIDVMDEAGAMRKLAPPFVPPEIAGIEEEIRQLAEEKNAMVSLQDYERAAEVRDKVRELRGRLDAMLSAWEENSLGERLRVDESHVRRVVAEITGIPLTHLEEKESKRLLNIEEELHRGVVGQDDAVRRVASAIRRSRVGVSSPKRPLGSFIFLGPTGVRKTLLAKRLSEYLFETPDSLVRIDMSD

SEQ ID NO: 106687 - protein, 203 aa, Unknown
  Obtained from environmental sample
  DOMAIN (1)...(113): ABC transporter
  misc_feature (1)..(203): Xaa is any amino acid
IVHGLAANRTERNQQVLNYLKDVGLASYHANRYPHEFSGGQRQRIGIARSLVVRPELIVADEPVSALDVSIQSQVLNLLNSIKREYELTFVFISHNLTVVEFFSDRIGVMYLGNMMEVASKDALYKNPLHPYTKALMAAIPVMHPRERRKRLLLEGNIPSAVDPPSGCKFHTRCLQCMNRCKTEIPVKTIISDDQYVYCHLYN

SEQ ID NO: 106688 - protein, 160 aa, Unknown
  Obtained from environmental sample
  misc_feature (1)..(160): Xaa is any amino acid
MQQIVPQSPADQNLAQRRALWFVSILIALLIVSAIGGVNLVLHAARANIPVTLRHDLGAPIQRRTAELTAWHAKLLDRINRLADMDMIRLFGNEVSSLTDDKISAMLAQERKERTSPGDNDVVSRLASQLPLMRRSLQNLIARSDIVALTLVTRSMYPIC

SEQ ID NO: 106689 - protein, 63 aa, Unknown
  Obtained from environmental sample
  misc_feature (1)..(63): Xaa is any amino acid
KRGEFYYSTKLRTKRTSLLYRGEELPIIPGMMVTVDIMTGKKSVLDYVLKPILKAKQNALRER

SEQ ID NO: 106690 - protein, 179 aa, Unknown
  Obtained from environmental sample
  DOMAIN (12)...(177): Glycosyl transferase family 2
  misc_feature (1)..(179): Xaa is any amino acid
MSTNTDKNILISIVIVNYKVPYCLIEALHSLRLAALYDRCEVIIIDNASGDGSREIVASKFQEAQWIQLKANVGFGKACNIGVAAARGEYLLFLNPDTVISANTLSDAVEFMEAHPKAGLMGPKILNPDGTLQLSCRRSIPTPSVAFYYFAGLSSLFPKSKRFGRYHLTYMDEDKTALV

SEQ ID NO: 106691 - protein, 242 aa, Unknown
  Obtained from environmental sample
  DOMAIN (98)...(167): HAMP domain
  misc_feature (1)..(242): Xaa is any amino acid
RRRLDEYTTLITKAQDNGGEIHEYTESLSQPQVAERLRDFTGYNRIEDVRIVGRRWLPIQSLIYVKIATSKSGEPYAVIVRAVISPVNATVTTLRYQLYYISGIILFLAIILAIVIAKKISKPIEKITQSAVMLANGNYDTRFTGKGFYEIVALSDTLNTAAVELSRVESLRRELLANVSHDLRTPLTLIYSYAEMMHDFPGEVTPEQTQTIMDETRRLTTLVNDILDMSKLENEMGKLNTS

SEQ ID NO: 106692 - protein, 66 aa, Unknown
  Obtained from environmental sample
  misc_feature (1)..(66): Xaa is any amino acid
SAVRMAEAYLLDKKSILTCAVQLNGQYGVNGLYCGVPAIIGEKGIEKINQCRAYQGKHSECFPHGF

SEQ ID NO: 106693 - protein, 259 aa, Unknown
  Obtained from environmental sample
  misc_feature (1)..(259): Xaa is any amino acid
EDQAYAGYLFVYFRSNATAEQQVYYAISNNAKSWKALNNNSPVVTMTGVGTGAIRDPFILRGEDGNFYMTATDMDAKNGWDSNYAITLSKSSDLINWTHRSINIKTKYTNTATHGANFSNIKAAWAPQVFWDDTVNKYMVYFSTATAIGNNANDKIYYTYANSDFTDLESTVKQLLYVGNGTGSDSGTRNAAIDGDIVYREGKYYLFYKTEGWRNNNDAGNFDHHIVKAESTQLTGPYYGYDDSNKSKAAKMESMGATT

SEQ ID NO: 106694 - protein, 213 aa, Unknown
  Obtained from environmental sample
  DOMAIN (67)...(148): mce related protein
  misc_feature (1)..(213): Xaa is any amino acid
MARDSKIKNFGIWVNIGNQNGDLFSIFPYIMETTKAERIRLGIFVMLMSFLVLGTATFLIGKKITEKFTPYKTRFNESVDGLNPGAKVKLNGIVIGQVTGLEVDKEDLNAVIVNFEVSSETPIKTTMTANLIGGISLTGLKSIEISGGSPSDPNAKKGSFIQSSVSGLKQITGQAENIAEKIEGILNNLLSITDDYNQKRLMNIATNIDHISA

SEQ ID NO: 106695 - protein, 238 aa, Unknown
  Obtained from environmental sample
  DOMAIN (179)...(233): Putative Ig domain
  misc_feature (1)..(238): Xaa is any amino acid
LTYVDTTTEEVAAANFTGKNIATDPGHGIPLERWTYKDFPVTIRYGNLTPLTTSNLTVNPIDVNVSAITIDPIPEQTYTGSEIKPELNIEYSVLTGTSRELEEGEEKDYTLSYSNNVNVGTATVTITGIRDYTGSRTVEFEIKAPVGGAPVITTTSLPNGAGGRAYSQTLTAAGDAPITWSVVGLPNGLSFDETTGIISGTPVNNAGTIWSENFGQPSRDKLSITVIATNCTGSDEKQ

SEQ ID NO: 106696 - protein, 245 aa, Unknown
  Obtained from environmental sample
  misc_feature (1)..(245): Xaa is any amino acid
ITDVTEVLDFHARWTPVTVTFVLPDDGGTVSPVSMIVGTNGKLPYLPIPAPPVCVTCNYVYEFDGWYTDSTGGEKVDKNTVFKENVDVYGRWTPRAAYTITFNANGGIVNPMSALVGADSKLPYLPTPKRDGYLFDGWYTAATGGARVTTSYVVSRDATIYAHWTIDASYSYTITFNANGGTVFPTSGKTGAGGILVSPLPVPTKAGYAFDGWYTTLTNGVKVTQSTPFTANDTIYARWMPVYTV

SEQ ID NO: 106697 - protein, 236 aa, Unknown
  Obtained from environmental sample
  misc_feature (1)..(236): Xaa is any amino acid
VTRIAINTAILSILFTALAATADAQQITFTATADRVAARSGERAVVVAVLVTPKAVAGAPSPGASDAFEVQNVNTGSSQSQNISIINGKIEQKREITYRFIYTIASKTDDQFTFPALTVNVDGSDYSTKPLHFNGGGGSGSAGASAHEPAPVRNPDIKVTLNMSKTAIYAGEQAMLTLKVAHRAGTPIQTQRGYTAAVDQIEKAFSSGLSNHRLFHTQVTQGQERVGNELYNTFTL

SEQ ID NO: 106698 - protein, 252 aa, Unknown
  Obtained from environmental sample
  DOMAIN (1)...(122): Secretory protein of YscJ/FliF family
  misc_feature (1)..(252): Xaa is any amino acid
RGTSPWAIFDTERWTATDFERNVNFRRAQTQMITNHIKALDDVDNANVTIVVPDRVLLGEQNPVSASVVITPRPGSDITTNIKKVEGIQKLLKYAVEGLKDENIVIVDQNGNVLNDFSGRAALDRLNLIEREQKQIQQLEAKYRADILRGLQATFTAERVRDLNIKIDMDMSKKAVETKQFLPTVIKERTPNLAYDDSVIVESITRSSSVSTTKWRGTGMNPEGPAGVEGQAPPVFKDMSNLYGEMTQETDV

SEQ ID NO: 106699 - protein, 225 aa, Unknown
  Obtained from environmental sample
  misc_feature (1)..(225): Xaa is any amino acid
MSTANNKYDIIVVGSGPAGASAATSAASAGRRVLLLERKPVAGVPVRCGEGIGHDGLTLSLEPRPEWIKSTVTRARMVSPSGTNVGVGDVGKSYILDRERMDADLVKMAVAAGAEFRVSSPVVSAGEAAPGMYNVAVAGAGSGGVDGGGTVFEAPCLILADGVESRLARCFGWKTALRLEDIETAAFARIRADGIEGDCCVFHTGSVIAPGGYLWVFPRGEGEAN

SEQ ID NO: 106700 - protein, 245 aa, Unknown
  Obtained from environmental sample
  DOMAIN (147)...(206): TGS domain
  misc_feature (1)..(245): Xaa is any amino acid
TPYSIWRKMETKNVAFDAIFDIVAFRFIVDSVEDCYRVLGMIHSIYRVVPKRFKDYISTPKPNKYQSLHTTVIGPQDERIEIQIRTHEMDRIAQYGYAAHWLYKQGNHDAQSSDLAWLGDIVDFVRNVSDVSEIEERSKLLSYADSVFCFTPQGDIKMLPKGATALDFAYEIHSSVGHHCVGAKINKVIRNIKTELANGDYVEILTSKTQNPSPEWERFVVTHKARQAIRHYLKGKMRDEMMAYG

SEQ ID NO: 106701 - protein, 238 aa, Unknown
  Obtained from environmental sample
  misc_feature (1)..(238): Xaa is any amino acid
ARLPADAKSGKIAEALNALSQAAASAADAGALLEQLSGDSGSRLNARELDKIEERLFKIRELARKHRVDPDGLPAVCARMKETLDNINNSDEALRALVKAEDDAHEKFLALAAALSKKRQAAAKKLSQAVLAELPPLKLAKATFEVQVEPAEEGPNGADKAQFVGATNVGAKSGLLHKIASGGELARFTLAIKAVISGGNEIGTMIFDEVDSGISGATASAVGERLARLGQAVQTLVV

SEQ ID NO: 106702 - protein, 147 aa, Unknown
  Obtained from environmental sample
  misc_feature (1)..(147): Xaa is any amino acid
MKKLIVLTMLLAGAGLLNAQDAVSIVNSAKNRVKMNTISSRSRMVITAKDGSVTERVIDQYSKDGPNGSRTVIVFQKPANVAGTRFLTMDTASGGSDRWIFLPSLGRTRRIAASESGGSFMGTDFSYDDISSMDRDVSLDTHTILRE

SEQ ID NO: 106703 - protein, 182 aa, Unknown
  Obtained from environmental sample
  DOMAIN (3)...(181): ExsB
  misc_feature (1)..(182): Xaa is any amino acid
MSFAVVSLSGGMDSCVAASVARNDGHDLALLHADYGQTTEVRERMAFEQIADHFNVPQDRRLVVPMQALKLIGGSSLLDASLPIERGDLERTDVPNTYVPFRNAHLLSVCVSWAEVLGAGHIFVGFVEDDSSGYPDCRSSFLRSFEVAANEGTRPETKIALEAPLINKTKAEIVRLGAELGS

SEQ ID NO: 106704 - protein, 224 aa, Unknown
  Obtained from environmental sample
  DOMAIN (96)...(223): Glycosyl transferase family 2
  misc_feature (1)..(224): Xaa is any amino acid
MDPLLSGGYAGTDLSLRLERMFGRPVTFYRPELLMHRYYAAGGQKESVKQAGHALMKEYLGWKRARSEALQAPAAPSGFTASDARARRKSGAPLISVVLPAYNAENFLAECVQSILRQTVQDFELLIIDDCSTDTTADVIRGFSDRRIRHHKNSGNRGVSESRNTGLKLARGKYIAMMDADDVNREYRFAAQVRLMEKNPRIAVCGGSCYKFGEASGHMRYPLT

SEQ ID NO: 106705 - protein, 243 aa, Unknown
  Obtained from environmental sample
  misc_feature (1)..(243): Xaa is any amino acid
MHDIVAKLHSRYNPQTEARRYIDALKINTDIDCFILIEPGMGYMIPVLRENRPDCKIIVLHADAGFRTLTGVFPGDAVWYPDSETGVQEFLEAEVPLAARVRMVEWRPGLNVYGDKVLELVRESAEFIKRLEAGRRTDAFFGKRWLRNFFRNLALFKTTLIYRKMDIPVVITGSGPSLEAVLPRILALRDKIFIIAASSSLPALEAGGITPDMVISTDGGGWALTHLYAFFRPLMPEPGILAL

SEQ ID NO: 106706 - protein, 215 aa, Unknown
  Obtained from environmental sample
  misc_feature (1)..(215): Xaa is any amino acid
MNPDDPYLRAMAYTELELYKEHFENHTVFWVSDIDRIFYTAGNEPYIVNPDDPASYWYNLTLYETEKFNFNINYNPNLDQINLWVNVPVFADAHDVKSPIGMLGIGINLTNFSNFVASSYSEFDKNITPYMFNKYNEITSAADYNLVENKVRLDDLLGNTGKELIRVSHELSEGESRSFVYDKKIYLVNSIPEMEWYLAVSYPMPGFWALNRAMN

SEQ ID NO: 106707 - protein, 131 aa, Unknown
  Obtained from environmental sample
  misc_feature (1)..(131): Xaa is any amino acid
MRFPDKADKSVIDYNPWVKITNIPLEAYEYVVNGRPAIEWVMERYQVKTDPPSGIKNDPNDWAKEHEKPRYILDLLLSVMTVSLETMKIVRALPKLEFEDTARTSSRDSSIDPVWWDIYKQQPLKLYHPAW

SEQ ID NO: 106708 - protein, 243 aa, Unknown
  Obtained from environmental sample
  misc_feature (1)..(243): Xaa is any amino acid
HPANYSLNIYGVSARDQYGWNADDYDDDDDDVSPTLNNVNILNDDDKKEIDRDKYPECLKEQSTRDKHFTRLAEIIEKIPKNGHNVNGKPFDWCSFTLTRGSVFHTMMVLAAYDFDIVKQQRLMALFPLAEPGAKDDFLDFFISRDISGENRVFLFDCLSDKSMPVRMSAAKLLKRITLDEPEIVKVEALLALKTGEIRQTALKTIRNAGDDAVLSSVKRLYNRQNDNKRLAALDLLSAVKKS

SEQ ID NO: 106709 - protein, 73 aa, Unknown
  Obtained from environmental sample
  DOMAIN (1)...(70): RbsD / FucU transport protein family
  misc_feature (1)..(73): Xaa is any amino acid
MMAPVSGDSLDEKVEQSYRAVIDRRWPGTPEIERVERFAFYERAKQAFAVLMTGETVKYGNILLKKGVIPSEQ

SEQ ID NO: 106710 - protein, 151 aa, Unknown
  Obtained from environmental sample
  DOMAIN (5)...(132): Putative small multi-drug export protein
  misc_feature (1)..(151): Xaa is any amino acid
MPVSELRGAIPFAIVNGIPWYWAYLFAVIINAMVAPGCWIFLATVHKLFYGTSQEKGIRWYKNFFDRFVEKTRGKISVKLEKWGWLGITVFVAIPLPITGAWTGTLGAWILGVSKKRTMAAVIAGVVIAGAIVTAVFVLGIEVFTFFIKKN

SEQ ID NO: 106711 - protein, 49 aa, Unknown
  Obtained from environmental sample
  misc_feature (1)..(49): Xaa is any amino acid
IKQEIAKVKVLSANSDWFGVTYKEDREAAIKKIDELTSAGVYPAPLWEK

SEQ ID NO: 106712 - protein, 245 aa, Unknown
  Obtained from environmental sample
  misc_feature (1)..(245): Xaa is any amino acid
DSRRDFGFRFGSVGPGGAEYKIRILATADTRAEVLPQDTYTMTSANLGWARLASAIRAERGKGVTTLLVDGGNALHGSPLAYIQNKMHPGAPNPIIEIMNGLGYGAMVPGERDFDFGTPALKKAAAQAGFPFVAANLLDSAGNTLFAPYTKVTLDGVSIALLGLSVPSPHSALNAQDSPAFVVRDAVETVKEWVPRLKNREKADLVVVLMHTGQVGKRTPPNNENAAISLLDSVSGIDAVVVSQS

SEQ ID NO: 106713 - protein, 258 aa, Unknown
  Obtained from environmental sample
  misc_feature (1)..(258): Xaa is any amino acid
CSTQTVVWEDEEGSKFIVTLINAIAYGGGKYVAVSDDSNIAYSEDGITWTAIPPGKDEGTTRFGSSNNVEGIAWGNGRFVAVGSSGIAAYSEDGVTWTNLQIPILGTSNGWIDGIAYGNGKFVAVGYTEIYKRGAIAYSTDGLTFTYVPQLPSEFGKTSITAVAYGGGKFVAGNDYGDMAYSADGITWTEVTDNSAWIVNNRREPPYNTANLFNIAYGNNMFVATGNHIKLVISADGITWTAIETGIFDMEEDYFISP

SEQ ID NO: 106714 - protein, 206 aa, Unknown
  Obtained from environmental sample
  DOMAIN (11)...(191): Peptidase family M48
  misc_feature (1)..(206): Xaa is any amino acid
GKRLAAAAEKWVKSKGAENYLDGYEWEYKLVDDKQVNAWCLPGGKIVVYTGILPVTKNEAGLAVVLGHEISHALLNHGQQSMSADLLQQAGMIAVMLGAEALGASENVQLATLLLYTIGAEYGAALPFSRSNESEADRYGLSLMAIAGYNPDEAPPFWERMKAAGAGGTPEFLSTHPSPDNRIKQLQGWNAEAKKIAAEFGVTRFN

SEQ ID NO: 106715 - protein, 171 aa, Unknown
  Obtained from environmental sample
  misc_feature (1)..(171): Xaa is any amino acid
MNALADTELIDALYKASRAGVEVWLNVRGVCLLVPGVPGLSEHIRVVSIIDHYLEHSRICYFANAGAEELYLSSADWMPRNMERRVELMFPILQEDTKQSVLDILRAYFLDNSHAWLLGPHGSWSRIEGEGEPFRAQRHFLAEAEKAVSAVRRESSAVEDSGFVIRRSPQS

SEQ ID NO: 106716 - protein, 187 aa, Unknown
  Obtained from environmental sample
  DOMAIN (18)...(183): GGDEF domain
  misc_feature (1)..(187): Xaa is any amino acid
YIKLNELNKQLICEIEKLEALSVTDELTKISNKRSFLEYMNLIWEHCQGLRLQLSAVMIDVDNFKKYNDSLGHLEGDKALLAIAQCLKNQLKRETDFVARFGGEEFVCLLPFIEKNEALAFASTLVQSVENMKIPHPGNEHSKYLTISAGMAHIVPNDDNSSAQLLDLADRALYAAKKTGRNRVVVN

SEQ ID NO: 106717 - protein, 90 aa, Unknown
  Obtained from environmental sample
  DOMAIN (11)...(65): Helix-turn-helix
  misc_feature (1)..(90): Xaa is any amino acid
MVDRNIFSARFGILRDDFNVTMVDVANALAISKQSVHQWATGKNVPSTDTLIALADYFNVSLDYLVGRTDEPALSQSREDNFGLTAYTGA

SEQ ID NO: 106718 - protein, 186 aa, Unknown
  Obtained from environmental sample
  misc_feature (1)..(186): Xaa is any amino acid
MRELRESQQETDRQIRESRQETDRQIRESQQRTDKILSELSKNIGGLNNRLGQLTEAMFSAELWKKFDKQGYGFTKQSHDVKFTENKQVIAESDFLLEDGTYVMPVEVKTALSIDDINGHIERIGIIRRYMDARGDTRKLVGAAATAIVNEGVIAYAHKKGLYVFVQTGDTVAIADTPHGFKAREW

SEQ ID NO: 106719 - protein, 236 aa, Unknown
  Obtained from environmental sample
  misc_feature (1)..(236): Xaa is any amino acid
DAVTGMIEYFVDGKSETIVYATSTGHESSEVFTPVVGNSGAFILGGRYKGIMDEFRIHGVCAGRSSVQKYAPAGGRAETSYIDLGGVNSAVVRVDVSGGRTSINGTRISNEFRENGRFRFSDDSEMSFFIRSSENPWRLKENKWISFTPGNNLKETIKGRYVQIAVDFYPSSDGESTPYLDEVRIVYQANEPPLPPGNFTAVAVDGGVILRWKQSPDISAKGYLVYYSSVRGEFFG

SEQ ID NO: 106720 - protein, 214 aa, Unknown
  Obtained from environmental sample
  DOMAIN (88)...(194): Biotin and Thiamin Synthesis associated domain
  misc_feature (1)..(214): Xaa is any amino acid
AFLVRAGADSLTLFQETYNEALFLELHPAGPKRDFRFRLDSQHRAALAGMRAVSVGALIGLDDWRRDALCTGLHADWLQQRHPGVEVGVSVPRMRPHEGSPIAAHPGTERDLAQYILALRLFLPRAGITVSTRERASLRDRLLSLGVTRVSAGVSTAVGGHAVRHDENAGQFHIADERDVDSMAAAIRAQGYQPVFKNWEPPDGVYDCGGAAGM

SEQ ID NO: 106721 - protein, 216 aa, Unknown
  Obtained from environmental sample
  misc_feature (1)..(216): Xaa is any amino acid
MPKLFWIGSPFFSQALRGCGWEVIAHNFEHAAVYGWDDILKLADGPPDAIVVADKSRPPFVLGQETFPCLTVLYAVDTHIHSWLPMYAQSFDLCLVSLRDHLERFRNQRLPADRVIWSPPYALSSATPPAAPVPHVWPCLFVGAVDPEHTPGRVRFLDALRRILPDLHVTRGAYAALYPQADVVLNVSERGDLNFRVFEALGCGACLVTPDVGHGL

SEQ ID NO: 106722 - protein, 222 aa, Unknown
  Obtained from environmental sample
  DOMAIN (37)...(79): LysM domain
  misc_feature (1)..(222): Xaa is any amino acid
KFGISLGAVIASNNIRNARQLKEGVTLRIPNIDGIPYSIKSGDSLSKISVSFNVPMEVILDINDLKSDVIKAGETIFIPGARMNDLDLRMSLGELFIYPVSGKYITSNFGMRKDPISGELSFHTGIDLRANTGASVMASMEGVASVIGESRLYGKHIILSHPNGYKTMYAHLNAVSVKQGDKVLQGRKIGEAGNTGYSTGAHLHFTIYDKNGKPINPLDLLN

SEQ ID NO: 106723 - protein, 177 aa, Unknown
  Obtained from environmental sample
  misc_feature (1)..(177): Xaa is any amino acid
YSGQELSYTKILGQLQDAGNTVTIAHYLELLAKANILCGLQKFSENKLQVRQSSPRFMVFDTSLMTYSYGTSKKSLLENQTAKGHLVESAVGAYLLAKAREENFEVYWWRDRDKEVDFVLKKGKSIMALEVKSGRVKHIGGYLDFKKKYPQARCLVIGDSNCSLEDFLLGKELFYIP

SEQ ID NO: 106724 - protein, 274 aa, Unknown
  Obtained from environmental sample
  misc_feature (1)..(274): Xaa is any amino acid
DIKPFAEAFDIWKRYGIMRAINSFFDSGNLLGKIRKAKNGERNATNLRHLIWILNEEETVFGRVPERMLRRFAELIESASGEEIEEKLETDDDAVQIMTIHTSKGLEFPIVFVPDIKLKGERNMPDYEKTPPVYHNENDIIVEYEISNRKIINGSDNAKSKEQKEILQESARNFYVAVTRPIYRLYIVYAYKESLKSNESSSVGQNICKKILEDKKILKDEDENIKVVESFEDIKYQEISRLKFEEEQDKQLKPPKSKNFEIEPAWQHTSFSTI

SEQ ID NO: 106725 - protein, 265 aa, Unknown
  Obtained from environmental sample
  DOMAIN (16)...(167): Cyclophilin type peptidyl-prolyl cis-trans isomerase/CLD
  misc_feature (1)..(265): Xaa is any amino acid
AVSAAPNDASYGNGMFARINTDKGDIVVLLEFQKTPLTVCNFVALAEGKMNVTGGKRFYDGLVFHRVIDDFMIQGGDPQGNGRGGPGYEFPDEIVPSLKHDGPGILSMANAGPGTNGSQFFITHVATPWLDGKHTVFGRVVEGQDVVNAIRQGDKIRSITIIRNGPLANQFKADQAAFDALLQKSAGSGNAKRDADIALINTKYPSAVQSPSGVKYIIQKKGAGNKPAPGKTVQVNYRGSFLSGQVFDTSDTRGRPLEFPAGVGA

SEQ ID NO: 106726 - protein, 230 aa, Unknown
  Obtained from environmental sample
  DOMAIN (22)...(207): ATPase family associated with various cellular activities (AAA)
  misc_feature (1)..(230): Xaa is any amino acid
RFFWEKAKSSKRYWQPFFARGHLLLEDVPGTGKTILARAFAASMGLSFARIQCTPDLLPADILGVSVWRANEGRFVYRPGPVVNQFILVDEINRATPRTQSALLEAMAEGQITVDGNCMPLPEPFFVMATENPVEYEGTFPLPEAQKDRFLLSLGIGYPDLESEAKMLESQRRITHPVTDLKQVAAVEDVLSIQEAVTQVHVDPPVRDYLLSLVTATRQDAGLRAGISPR

SEQ ID NO: 106727 - protein, 231 aa, Unknown
  Obtained from environmental sample
  misc_feature (1)..(231): Xaa is any amino acid
VVKDKETDGVKYKDYFEFSEPLCKCPPHRLLAMRRGEAEGFLRVAIAPEVDKAIEILERIFVKNDSESAQQVKLAIADGYKRLLQPSIETEVAALSKEKADKAAIATFADNLRQLLLASPLGQKNVLAIDPGFRTGCKVVCLDAQGNLKHNDTIFPHPPEKDKILASKKVAALVDAYKIEAIAIGNGTAGRETETFVKNLSLNRAVQVFVVSEDGASIYSASPVAREEFPD

SEQ ID NO: 106728 - protein, 205 aa, Unknown
  Obtained from environmental sample
  DOMAIN (21)...(75): KH domain
  misc_feature (1)..(205): Xaa is any amino acid
GYARDKGADIADLEIIRHPQRITITIHTARPGVIIGVKGANIEKIGSELQKYVTKKVQIKIKEVRNADNNAQIIAQNVARQLLARSSFRRAMKQAITNAIKKGNAQGVKIRLSGRLGGAEMSRTEEAKEGRIPLHTLRADIDFGFAEAHTTFGSIGVKVWVYNGMKYGKEQKEDAGALLRKRRERPPSHGNENRRSEGSRTEGRF

SEQ ID NO: 106729 - protein, 229 aa, Unknown
  Obtained from environmental sample
  misc_feature (1)..(229): Xaa is any amino acid
GLYFASARSNNINFYWSFLFSTFGTITWEALGETDSPALSDSINTAFGGIVIGEMLHRLFIELDKGGIGGRIGASFVSPTDRLTAAIRGYGPEEGPSKIFGSELAFGFSWINAKFFDDDEEVTSWNTPAGFLNYDLVYGDPYTAHSKTPFEQFDFNISLTVTVPFIHNLIFSANGYLASWLLADNDINQASNGITLHFDDYITDKGILDLNNGRENLSFNAHSLDIRKM

SEQ ID NO: 106730 - protein, 256 aa, Unknown
  Obtained from environmental sample
  misc_feature (1)..(256): Xaa is any amino acid
VVQARLQGKPDPKSKANVTIQQAANFTPPTVTIQSPANFSATNTATANLSVNITSQSQPVKNIKIIVNGRLIGKDELTAVKGANLQSERASLTVTGNQKTVNLSLPLNLDPGPNRIEVVAFNGYSESRRYIDVTRNAPAGEKPALPNLWILAVGVNTYDNAGPRLQGLGNLNFCVADAKGLVDSLKAQEGKRYGKVNSLLIADGEAHTPTAANIKQGLKFLEGAAPRDVVVLFLAGHGISAQESKFFFLPKDAAFS

SEQ ID NO: 106731 - protein, 122 aa, Unknown
  Obtained from environmental sample
  misc_feature (1)..(122): Xaa is any amino acid
MGTINLPKRPNYERKSAAGMRNMPVHEDSPQVTPQTVQLTVTQILEEEAGNMLNYLKGKLSPEVFERLDSKGSLKEKVYNTVDRYYQEMFGRYTASDDKDETAVFIYHTAGEIAELLRSGGE

SEQ ID NO: 106732 - protein, 237 aa, Unknown
  Obtained from environmental sample
  misc_feature (1)..(237): Xaa is any amino acid
KNTTNAFFPNAARDLLAAVIAAFIREGKKDPAIKKEFFYNVKLKEFLDLSNPQMIMDLLADSPDANAVMSYISGDNAQSQGVLSEMYSIVREIFIGVFAEKGAFSMREFVRGKGNKTLFIEYDLSIGSMLTPVYRLMFDLALKEALGRNKPQGNVYLICDEFKLLPHLRHIDDGVNFGRSLGVKVFAGIQSIEQLYEIYGQSRGRNIAAGFSSVYAFRSNDTATRDFISGLFGKNIV

SEQ ID NO: 106733 - protein, 221 aa, Unknown
  Obtained from environmental sample
  misc_feature (1)..(221): Xaa is any amino acid
MSGGAISDNTATNGGGGIASFGVFTLANGNIANNKARIGGGVYKKDEKLTISGGTISGNTASEDGGGVYHYSGEFAMSRGTISNNRAKYGGGIIINSEKFNMSGGTISGNTASKDGGGVYQHSGEFAMSSGTISGNTATGDGGGVFISLIEKEKINVFTMSNGSIARNKASWGGGVHISGPKEEVAQKYNGGGFRQNGGSITANSAQVGGGVSVLPYGTYD

SEQ ID NO: 106734 - protein, 110 aa, Unknown
  Obtained from environmental sample
  DOMAIN (7)...(108): Glycine cleavage H-protein
  misc_feature (1)..(110): Xaa is any amino acid
MNIPENLLYRDSHEWIRIEGKEAVIGITHHAAEQLGDVTYVDLPAVGAQLTAGKEFGSIESVKAVSDLYAPAGGSVIAVNEALANAPNSSTSRPTATAGWCASVYPPNPP

SEQ ID NO: 106735 - protein, 83 aa, Unknown
  Obtained from environmental sample
  misc_feature (1)..(83): Xaa is any amino acid
MKNNAKQVLWAGRLEEKPEAEAFAFQASISVDRRLVQEDIAGSRAHAAMLAKQGIIPAETAQALDRELERIAEEISSGKLIIE

SEQ ID NO: 106736 - protein, 241 aa, Unknown
  Obtained from environmental sample
  misc_feature (1)..(241): Xaa is any amino acid
EKVTGWSGRSFRVADFSSFTTPGDYRVKFGAAESYPFTIGTKVLQAKTGPGQLAFFKTFRSKDEGDKNLPIFGSSRTQNIYGGWFDATGDMGKHISHLSYANYFNPQQIPLVAWALLHARDCQPEAFGATALEEAAWGADFLLRALSSDGYFYMSVFDNWGDGYRWTEPAAGSKAPREICAWSGSDGNRSAAYQCAMREGGGMSIAALARAAKAEISGDSTATQYLAGAVRAYAHLKANPR

SEQ ID NO: 106737 - protein, 254 aa, Unknown
  Obtained from environmental sample
  misc_feature (1)..(254): Xaa is any amino acid
MDEIVKRPPDPSKEGFVFSDWYTDNYTFELPWDFDTAPYGYMTLHAKWDMSVPAVNTFTVTFDSGGGSGVSPIIVESGRTIAKPADPTKTGYDAAFTGWYEQNQTDTFDFNAPITANITLYAKWRPYELGERGPGDGIIIYLSEEGFIITYDNSTAHYLEVTPFDIGRPVWASPDYIHTDIPGTAKELGSGRENTRLIIVQLGSNAPAAHECFVYTRNGKSDWFLPSIDELEQLEKNRGLIGNLNGNYWSSTQY

SEQ ID NO: 106738 - protein, 247 aa, Unknown
  Obtained from environmental sample
  misc_feature (1)..(247): Xaa is any amino acid
TGGFSGPGAFKADPNRIHDLHMVQSSIALDSHLDVFEKGIAKKVDFSFSGPQSGRLAQMIRGGKVELGSIHTYLELFGRYFLDLTPRVALVAAEAADKNGNLYTGFNTEDTPVIIEATKFKQGIVVVQVNKIMDTLPRVDIPGDWVDFVIQSPRPFYVEPLFTRDPALITNAHILRAMIAIKGIYAEYGVRRLNHGIGFDTAAIELLLPTYGKELGLKGKVASHFILNPHPTLIPAIEDGWVENVFC

SEQ ID NO: 106739 - protein, 272 aa, Unknown
  Obtained from environmental sample
  misc_feature (1)..(272): Xaa is any amino acid
DEGTFHELAGPNLGLTSPHLPVLGEAVSFDDGVVTAVGTINSRPVFVISQEGRFIGGAVGEVGGAKIVGIFKLALELYNKANAKHSGKTDKLPAIVYSFETGGVRLHESNAGLLAHAEIMEWIQKCRGKVPMFSLVGSKVGCFGGMGFVCVAADAVIMSSLGRLGLTGPEVIEQEMGKSEFDSSDRALVYRTTGGRHKFIMNDCAFLVEDSIAAFREQLADLLKKPYSELAKYRVIGSYGLVEKQLALVKLVAELKPKDSRDLWAYFGNQGR

SEQ ID NO: 106740 - protein, 219 aa, Unknown
  Obtained from environmental sample
  DOMAIN (113)...(192): Toprim domain
  misc_feature (1)..(219): Xaa is any amino acid
MIERFNLGYAPANRDWLYQFLQSKGYSEEFLNGSGLFSDNYKGMAFFSDRLMFPIADRRGRIVAFGGRALPGTIQSDGKEPPKYINSRETAAYKKSQILFGLDLALPEIRRSKTVYLAEGYMDVIALHQGGVTNAVASCGTAFTDEQARLLRNWADTAILVFDADEAGQKAASKAIITCRKNGLGCSLALSGLDGGAQKDPAEILQNFGEDYLKRCMNS

SEQ ID NO: 106741 - protein, 271 aa, Unknown
  Obtained from environmental sample
  DOMAIN (107)...(176): Sigma-70 factor, region 1.1
  misc_feature (1)..(271): Xaa is any amino acid
ADTRKLPLGAKSKTVTPGKNKKPETGAKTAQAKKNPLPKKTAPEKNPKQGENREPRTSGTMVRHPSSSVEVRPKASGEGLAVKAAAMLGTETAGNSTPPATVTISGNVPLDPAVLKLVEYAKERKTLSFEEISDYLPEHISDTEKIEPVLALLEANNVQITVDDNSNEDDVDSESGKRTETGRKRAASNDKEASLVDDPIRMYLREIGRESLLTAEQEIELSRQMEEGENIIKNVIKKSGMIIPEFNRIAEEVFSKKDAARAEPYKKRNHR

SEQ ID NO: 106742 - protein, 75 aa, Unknown
  Obtained from environmental sample
  misc_feature (1)..(75): Xaa is any amino acid
MKNTRNAFLNLMVLAGLCYFLGWASSILDGYKLRILNLIAINAVLGLSLNLIYGMTGMFSLGHAGFMAVGAYTSA

SEQ ID NO: 106743 - protein, 172 aa, Unknown
  Obtained from environmental sample
  DOMAIN (33)...(171): ABC transporter
  misc_feature (1)..(172): Xaa is any amino acid
MTQQKTILAIKNVTLRFGGLVAVNDLSLNIPEGSITGLIGPNGAGKTTVFNVVTGFYKPTKGSVAFRGQTLTGLPPHKVCKAGLSRTFQNIRLFHNETVLENVMIGSYVRQKGMWWQTLLPFVFPNAVKEEREIRSAALSLLSHLGLAEQANVISSSLPYGAQRRLEIARAL

SEQ ID NO: 106744 - protein, 266 aa, Unknown
  Obtained from environmental sample
  DOMAIN (52)...(86): Tetratricopeptide repeat
  misc_feature (1)..(266): Xaa is any amino acid
MDYFKKFLDLKPSYPNNVEASITIAFLYFFKYDYKNAEEYFKKVIEYSPDKAEAYYDVGDIYYEKIKNVEKAVEYFKHAIEQKPDFADAYSYLGTISREAEDYAKAIEYYEKAIRLKPGPKSEYAALHGIGTAYFYKQDFDKAIEYYKKAIDLKIGDGDANIYFNIGIAYIRKQDYDKSMEYLKKVVELNSKHVKAYRTIGSIYSIKRNYTKAIEYYETAIRLDPKIDAYVSTGGAYYKKQNYDKALEYWEKAIKYQPGRQSRDIR

SEQ ID NO: 106745 - protein, 287 aa, Unknown
  Obtained from environmental sample
  misc_feature (1)..(287): Xaa is any amino acid
IDKTLLQNYHENNLVQIQSIIDENGKPAVIHSVYWNSGRLAMELGEKNGVPFVHSVISNSRGRVSRGAIEPVPKRAEYEQQIFESARYILCVSEDERQDILQFYNISSEKVCVVGQYIHEVFCLPAHDANGFPRLSCIINAEEQERSAQKYNTAYTIQTDEQYWNYKVFTYMGRISLSKGIDHIIKAWYRLYKNYGETCPPLWMLGGSIAEIHDARNIIKNDIPELAMLEQNRRLVWWGYLDATGLSTVLLKTLVMITHSLYEPGGRVIVESMSEGVPVIASPNGLQ

SEQ ID NO: 106746 - protein, 212 aa, Unknown
  Obtained from environmental sample
  misc_feature (1)..(212): Xaa is any amino acid
MIQSKRLLAQFGLFLLQNPFQKNFITGRIYQGNAKLICSPGLNCYSCPAAALSCPIGAAQFFLAGFKTSVSLYITGFLMIIGVIFGRFICAYACPMGLLQDILYRIKTKKLVHRLRFLRYIKYIVLSVFVILLPMIIVNELSGTGEPWFCKYICPSGTIFGAVPLLLANDFLQKLIGWQLALNLLLPPALCQRPYLYTVSSAVYYALLERYM

SEQ ID NO: 106747 - protein, 169 aa, Unknown
  Obtained from environmental sample
  DOMAIN (14)...(169): Fumarate hydratase (Fumerase)
  misc_feature (1)..(169): Xaa is any amino acid
MVNKASDNKTKEKFTSIMERFIALAAVRLSDDVMLRLREMRGREDTPLQKEIYDSYLENLQMALELKRPCCQDTGLLQFYIKTGTAFPHLDITAETLVEATRRATASVPLRPNAVNYFDEKNTGDNIAERSPWIDWEIVPNSRDMQITLYFSGAGCSLPGQAKVFKPSD

SEQ ID NO: 106748 - protein, 222 aa, Unknown
  Obtained from environmental sample
  misc_feature (1)..(222): Xaa is any amino acid
MAGSDDKGNATGVGSLEVLNLKGANIIASTGIENCYYELNTTTDNTIGNWMFYNCSRLKNITIPDNVHTIGYVAFHKCTGLTSISIPKNVTSMGNGAFTDCINLRNVVYEDSEETLITFNEVINCSTTNVFEHCPITTLYAGRNLAETPCVTAAFQNNTNLLTLIIGEEVSLIGDYALQGCTSLTNLIIWSSDTSTTGTIIGDGAFLGCTGLKSVTIPKTVT

SEQ ID NO: 106749 - protein, 259 aa, Unknown
  Obtained from environmental sample
  DOMAIN (31)...(259): Aminotransferase class IV
  misc_feature (1)..(259): Xaa is any amino acid
MENIDWKNLPFGYIKTDYNVRCYYRNGKWGEVEISSSEYIMLHIAATTLHYGQEVFEGLKAYRGKDGQIRLFRCRDNAQRMYDSAEYIKMAPVPVEMFVEAVKKVVKLNEHFVPPYESGATLYVRPLLIGSGAQVGVKPSDEYLFTVFVSPVGPYFKTGFKPVDVIITRDSDRAAPLGTGHIKCGGNYAASLPAGVAAQQNGYATCLYLDAREKKYIDECGPANFFGIKNNTYITPDSKSILPSITNRSLITLAEDLGI

SEQ ID NO: 106750 - protein, 252 aa, Unknown
  Obtained from environmental sample
  misc_feature (1)..(252): Xaa is any amino acid
MRSAKEQALDVKIRETLQDLGVSAKVLEAAEMIISDEEIQAVQEYANNVSIVRLGYNDHGPVHMRTVLLNAVIMLGFLREAGIKTSLETEGIGDFDDSLIAVIYSGMLHDLGMSMGRHDHEIFSMHLAYPIIDRQLSLIYKDSLQKKVIVRSLALECISGHMGNRPVYSLEAGIAQVADGCDMTKGRARISMALSQNHRPGSIHQYSANSIENVRLTKGREKPIQIEVLMSSEVGIFQVEEVLLTKIASSTA

SEQ ID NO: 106751 - protein, 287 aa, Unknown
  Obtained from environmental sample
  misc_feature (1)..(287): Xaa is any amino acid
TKYTATITLTPKTGYTLRFVPADFFRVEGATSVSNNANSGVVTAGFWPTDMIINNAAIQGVTAPVTGSSPAVTVTNPTQYTGTVVWSPPVSEIFEYATVYTATITLTPRNYHTLQFVPADFFTVEGATSVRNDANSGIVTAVFPATGIVSVNRSAIQGLAVPVTGETPVYAITETHQYTGTVAWSPSVSGNFSAETQYTATITLTPKTGYILQGITANFFTVEGAESVSNDANSGIIKAVFPKTAATINIPAIQGVTAPATGATPVYAITETSQYTGTIVWSPAISL

SEQ ID NO: 106752 - protein, 167 aa, Unknown
  Obtained from environmental sample
  DOMAIN (1)...(164): Domain of unknown function (DUF323)
  misc_feature (1)..(167): Xaa is any amino acid
YDVTGYELHFFNEGPAVSDSAWNKAVIINGSNGYRLPTEAQWEYAARGGNGMPFNYLYSGSNTAGDVAWYTDNSGNITHEVGKKAPNSLGLYDMSGNVWEWCWDWYGSYSNEAQTNPSGPATGSYKVLRGGAWNLEAGGVRSIMRTNRTPNDRWERLLGFRVVRPSE

SEQ ID NO: 106753 - protein, 285 aa, Unknown
  Obtained from environmental sample
  misc_feature (1)..(285): Xaa is any amino acid
VECGKSLAAETLFIDEAPKNYVSGGDALSWGTSTSASVLTLGLTPGNDITEIKLNWYSSGAATDKVAQVRFIRGTLTVGHELIEETGTTAAASSGYTQHKATVTGLKPGASYVYAVSSNGTDWSETYEFKIPVPGPFKFAVIADPQLTTGNIDPNSRYPATGTTTAAGWLETMNKIVAKGVSFIASGGDQVDAGGGNENEYTNLFAPAGLRNLPLAPVSGNHDNHLHFNYHYNLPNAQTFANETVATEAGRNYFYLYSNILFVVLNTAPYPGSTSAATPAVERFN

SEQ ID NO: 106754 - protein, 83 aa, Unknown
  Obtained from environmental sample
  misc_feature (1)..(83): Xaa is any amino acid
MKYEYIPKGVCAGKMEFNIDDDKLSGVRIIGGCGGNSIGISRLVEGMNVDEVINRLENVKCGGRPTSCPAQLAEALREVREKK

SEQ ID NO: 106755 - protein, 199 aa, Unknown
  Obtained from environmental sample
  DOMAIN (4)...(192): Peptidyl-tRNA hydrolase
  misc_feature (1)..(199): Xaa is any amino acid
MIQLAAFLGNPGSGYERNRHNAGRMLAGALPFYASLSWGKKFKGLYASRENSRFLMPETYMNLSGESVYEAASFFKLKIEEIIVVHDELELPLGTISLKFSGGLGGHNGLRSMKKCFGSADFWRLRIGIGRPDSRLPGEGGPEGSGEGIIDWVLSDFSKNETEMLYNVLDAGANLLQKVLACEPETLIPEMGKRRLILR

SEQ ID NO: 106756 - protein, 290 aa, Unknown
  Obtained from environmental sample
  misc_feature (1)..(290): Xaa is any amino acid
AEEGNFKYDQSSEPSIFYGGLGQGIKGALKSIDERFRYGGIPGKDQRIYYFNTKEIMGNKYGTPNPIPYLIVDPTINLRLTISLRANGEYSFRMINPVLFYANVCGNVDEPYTRDKIDSQLKSEIITVLGPSLGKLGKGLEYHEISFQTEKLAEILNEALSAKWREGRGIEIVNFGITCTASPEDETRIKQLQTSAVMRDPTMAAASLVNAQSDAMRTAAGNTGGAMAGFMGMGMAGAAGGMNAQNLFAMGQQNAPQQQAPQQQATASAAAGWTCACGHAGNTGKFCAEC

SEQ ID NO: 106757 - protein, 183 aa, Unknown
  Obtained from environmental sample
  DOMAIN (1)...(136): HD domain
  misc_feature (1)..(183): Xaa is any amino acid
SHIERTQRGIKILLEAIKKHGFYSEETKDWEVDLLLRSSQLHDVGKISINDNILRKTEKLNDEEFEDMKRHTVIGEQIIDKIRSLAKESDFLKYAKIFASSHHEKWDGTGYHRGLKEDEIPLLGRIMAIADVYDALVSDRSYKKAFSHEDAVKMILEERGKYFDPALVDLFLEVSDDFKNQGP

SEQ ID NO: 106758 - protein, 270 aa, Unknown
  Obtained from environmental sample
  DOMAIN (1)...(96): Response regulator receiver domain
  misc_feature (1)..(270): Xaa is any amino acid
TSGNSAESGQKAIELIKTENPRYDLIFMDHMMPDMDGIEAVRIIREELDSEYGRNVPIVALTANALVGTSEMFLSKGFNGFISKPIDIVQLDEALNQWIRDRKGEENGGQGIENSDSKLYSNHSKTDSPVPSPNFPFPEIPGVNVKKGIFMTGGTEAGYRNVLATLNKNVKERLPLFQTLPDTDTLPMFITQVHSLKSSTASIGAAEVSARAAKLEAAGMAGDLAFIREHLGDFLEHLTALVKNIGIALQITSEENYVRGIQADKTQKTY

SEQ ID NO: 106759 - protein, 150 aa, Unknown
  Obtained from environmental sample
  misc_feature (1)..(150): Xaa is any amino acid
KPKLPSLFAGDEKQKALAATAQAMAEGFFKSPLGRKALSANFRKTEYPVLTVIEGTQNKIIVSGKIDLLFEAGNVFYVVDFKTDRDEDIVRHTGQLAIYKRAVEDIFGKPVECRLFYLRNGHEADLTGEADKASPEELIAAWEERLKQLN

SEQ ID NO: 106760 - protein, 231 aa, Unknown
  Obtained from environmental sample
  misc_feature (1)..(231): Xaa is any amino acid
MAMPELLKRLFENDGKGPRLRSDIAPENIVFITPEAYAALGPEKLTNGVMYILWREGGGNFLIIQEIIMNGQRYKVNAPGNSGNSGNYELCEVYYFRSPVLRPGFQPAQGGLLEDAAALYPEAWAYLQTPEGQLLCKLEAEWQALSAAAPWKGIGGVPWFVIDLVAGTLRLPDLRGMYQEAAGFDGLDVGGRHEDTIVNITGEFHGGRYASGAFAVVENINIGYTNGVAHA

SEQ ID NO: 106761 - protein, 258 aa, Unknown
  Obtained from environmental sample
  misc_feature (1)..(258): Xaa is any amino acid
MTLLMEMKVRLAEAAKDRICGQFQWLFNSHENPGRTQNGEGLREMDRVGPVNYKGLFTAWGEPVDVFYMYRSNYAPKDKEPMLYIAMHTWADRWTTIGKKDSIMVFSNCDEVELWCDTLMLARQKRDGSGGVGTHFTFSNVNITSNLLRAYGFNNGSKSAVASDVVLLHHLPQAFYTDSLALDVKNIAQPMQDYSYLYRVNCGGSDYTDINGNLWLADVHKTQPDTWGSLSWTDDYEGLPPFYGSQRRTHDLIHGTHD

SEQ ID NO: 106762 - protein, 293 aa, Unknown
  Obtained from environmental sample
  DOMAIN (2)...(293): Protein of unknown function (DUF1703)
  misc_feature (1)..(293): Xaa is any amino acid
ALAINGFDWEWKPYPVIRIDVSTGDYPNYGIKALNSTLHAEMRREAEKYGAKLSRADSPDDQLKSLIEKACKKNGEKAVVIIDEYDSPLTNTLNKRDFHFELRDALKAFYSVLKSYDAYLRFVLITGVSKFSHVSLFSGMNQLTDLTLDPRCADICGLTQEEMVVNFGPEIDGILENTGRNREEYMDQLRCYYNGYRFSKKQLTVYSPFGLLKHFYGGGEFSDHWYETGTPSFLVDLITNNKINILDLKDAQVTQSDFGKYDVDNIAPAPLLCQTGYLTISDYDADSGEYTLD

SEQ ID NO: 106763 - protein, 264 aa, Unknown
  Obtained from environmental sample
  DOMAIN (1)...(254): ABC transporter transmembrane region
  misc_feature (1)..(264): Xaa is any amino acid
MASMTGIVAAGMTDESLKTALRLAGILLGLFLIRILFRFLSNYCSHRAAWKLVLELRMKVYNAIQSFSMDYFHNKQTGELLSRVMNDVATFELLYAHITPDIITNFVTLAGVTIILFSINARLALITCIPVPFILVSGWFFIHKVRPNFRKMQKAQGELSAQLQDNLSGIQEIQAFGRQESASKKVLAKGENFTHNMLRALKINAVFNPGVEFLTSLGSVIVVGFGGFLAYNNQLSVSEVVGFMLYLALFYAPITGLAHLLESS

SEQ ID NO: 106764 - protein, 288 aa, Unknown
  Obtained from environmental sample
  DOMAIN (94)...(286): 2-oxoacid dehydrogenases acyltransferase (catalytic domain)
  misc_feature (1)..(288): Xaa is any amino acid
VGAGSGPGGRIIEQDIRAFLATRPPLTAAAKEELRKRIAAGITGYVEGEGSGIGSRVTSGDLEAASAKTAKPSLMGVGETASKAADHRSEVTLPDEFKDTPIKGIRKIIADQMMKSHSTTAAFTLNSSAPAVKLQELRSRFKAADPALGLNKITINDLVLFAVSRALPRFPDLNAHKLEGSIRTWTNVHLGVAVSTDRGLMVPVVRNADKLTLTQISTRAKELAEACRKGSVLPEDLHGSTFTVSNLGNTGIESFSPVINIPEVAILGVCSISPKPVENVQGQYEISP

SEQ ID NO: 106765 - protein, 158 aa, Unknown
  Obtained from environmental sample
  misc_feature (1)..(158): Xaa is any amino acid
MPKSIFVDPSEVRKSQTIKIKDIPVNQYKSDFAKELKTYGKEGLVKILYHMLCIREFENMLNTFKIHGAWNGIEYNHKGPAHLSMGQEAAAVGQCVNLGTEDLIFGSHRSHGEILAKCLSAVEKLDEGKLEAIMKEFLGGDTLRMAEKVPHTGVRDLA

SEQ ID NO: 106766 - protein, 112 aa, Unknown
  Obtained from environmental sample
  DOMAIN (1)...(109): Pyridine nucleotide-disulphide oxidoreductase, dimerisation domain
  misc_feature (1)..(112): Xaa is any amino acid
AVYSLPEAAGIGLTEQEALAQGIAIKKAVLPMTVSGRFIAENGIRAPGNVKVIVEAGSEKILGVHILGPYASEMIWGAAALVENEMRVPDVKEMIFPHPSVSEVIREVIWSL

SEQ ID NO: 106767 - protein, 286 aa, Unknown
  Obtained from environmental sample
  DOMAIN (93)...(285): Hexokinase
  misc_feature (1)..(286): Xaa is any amino acid
IEGIGFTFSYPMEMQTNADGILLAFSKEVDAPDVIGKAIGAGLREALARKGYVYDGPIVLLNDTVATLLSGIVSIPVDGGEAPTKNAYGVTGGPVIGFILGTGFNTAYPETSIPKIGFESKTSPQIVVCETGTFNLRYRGPLDREFDNTTKNPGTYALEKSTAGAYLGPLTLHILQQAVKDKVIRFKKSEEFLALPQLETRILNEFSRAPLTGEGPFASFFGLDESDALAAVQYLVSIITERGALFSAAVVAATVERMQSYCEPYAPIRIAVEGTTYMIFKGMRRS

SEQ ID NO: 106768 - protein, 291 aa, Unknown
  Obtained from environmental sample
  DOMAIN (2)...(291): Sodium:solute symporter family
  misc_feature (1)..(291): Xaa is any amino acid
TGLGEAFWTALGLFIGTWINWAFVAKRLRSYSQIADNAITLPEFFSKRFHDKKRILLALAAIISLLFFSIYVGAQFITFGKLFNSLFGINMILMVIVGAVIVLFYTLLGGFWAVGMTDLIQGLLMVTALVLVLIFGVVHAGGFSGVAENLKSFPRFLDFFGVADPQGVSNGVPLFGAEGTKYSFLTIVSIMAWGLGYFGMPQVLVRFMAIKKTSMIRRSLTIAVVWCFIAQFAAVGIGLIGRALFPGVFDSRSAAESIFIKLSGNFFPSLLAGVIISGILAASMSSCDSYL

SEQ ID NO: 106769 - protein, 110 aa, Unknown
  Obtained from environmental sample
  misc_feature (1)..(110): Xaa is any amino acid
KFGYRPSKVILEKLEKENEIAENLSVAAHLIHGSSEERFTVRYCPGPGVSRTEIESVGYEWGSLDEAVARYDVKKLPMGWNTMPNGERIFFVPNPALGLWAEKRRFYGDD

SEQ ID NO: 106770 - protein, 280 aa, Unknown
  Obtained from environmental sample
  DOMAIN (243)...(261): Chlamydia polymorphic membrane protein (Chlamydia_PMP)
  misc_feature (1)..(280): Xaa is any amino acid
MVSSGSIKLLPDSLAAGVITLLPYWYPTTDFYGNSINAGAAAGAVQDSVSGNGYYLELSVNDTSRGSINATSLQDMEGFVQPSTVVTIGATSAGEDYYFAYWLVNGERMEDSPLQLPLENHTRVQAVFSKDFKVNDFSDNSGSETTSGTLRHALTNVINGDKVIINGTEGQTIYLAGTLPEIKRKITIEGKGVTITRANSWTQSDNDQFLRISNTVTISRVWFKDGKKGAIYNNSSGNVTLESCIFSGNQSSGDGGAIYNYNGNMKVNGCTFYGNSTDGD

SEQ ID NO: 106771 - protein, 281 aa, Unknown
  Obtained from environmental sample
  misc_feature (1)..(281): Xaa is any amino acid
TSSVRVGDWAIAMGNPLGEQFAFSVTMGIVSALGRTGGPGGNINDFIQTDASINQGNSGGPLVNIYGEVIGINTWIASNQGGGSVGLGFAIPINNAKRAMDEIIASGSVKDGWLGVSLTDADRDTLQALGIAAGQRGALALQVFLGSPADKGGIRPGDFITHVNKNEVRGTTQLTQMVGNIKPGDRGVFTVIRDGASMDFTVTIEVRNDTVATENNKLWPGVMVAILTDEVRSSLNLDKDAQGLYVAQVIAESPAAIIGMQRGDRITAVNDTPVKDLQSFY

SEQ ID NO: 106772 - protein, 252 aa, Unknown
  Obtained from environmental sample
  misc_feature (1)..(252): Xaa is any amino acid
MDATTAAVLAIGLLVFVAHGLEDVFARTKIPDVLILLFIGLLLGPATGLVKPEALGGAGSVFTTMTLVVILFEGSLGLDLKVLRNSLLGATSLTVWNFVATLAVVAPMAHAILGFNWLQSFTLAATLGGTSSAVVIPVVRRLRMGEKAKTILTLESALSDVLVLVVTLALVTTQKGGGELEVGKLFGKMFNSFLGAGVLGCLAGVFWSYALHKLHGLQKSIFTTPAFVLVVYGITEWMQFSGAIAALLMGIT

SEQ ID NO: 106773 - protein, 199 aa, Unknown
  Obtained from environmental sample
  DOMAIN (1)...(199): Glycerate kinase family
  misc_feature (1)..(199): Xaa is any amino acid
MEAARFLASAGDLLLPLSDGGDGFIECLQNKLGGAVEELPAADPFGHVRPVPILVLPDGAIAVECAKVIGMAGLKELKPLIASSDGLGELLRQLQSAPKLLVGLGGSATVDGGMGWPKIALPPTKVFCDVTTDLSDAVRLFAPQKGACPADLPALYDRLMALGLPTGKHTGAAGGLGAKLKSLGAELLDGAKAMLETLG

SEQ ID NO: 106774 - protein, 88 aa, Unknown
  Obtained from environmental sample
  misc_feature (1)..(88): Xaa is any amino acid
LHHAIWESLNGPVPEGCVIIFGDKDKMNLSPSNLVCVSREQLAVMNRQKFIYGRAELTKVGAALAGVKIAAGRGKRKLKKSNHKKGAR

SEQ ID NO: 106775 - protein, 169 aa, Unknown
  Obtained from environmental sample
  misc_feature (1)..(169): Xaa is any amino acid
MQKLAIKPEFRDLLPPLSEGEREALEKSILAEGCRDPIVVWGSIIVDGHNRYDICHARAVHFETVDFNGGPGFSYLPTMREKEEAVKRWIINTQLARRNLTDEQREEYLGILYASEKSDPLENLKKAAPGSSSEGPNKSGEESEKPRLDANGSKLQFATSEKIEDTATK

SEQ ID NO: 106776 - protein, 68 aa, Unknown
  Obtained from environmental sample
  misc_feature (1)..(68): Xaa is any amino acid
FEKGSIKDIASIVRSLYHRSKVKELPILEKKLYDSAQRLLEDELSISLRKSKKEVEDLIHEHLEPPEE

SEQ ID NO: 106777 - protein, 269 aa, Unknown
  Obtained from environmental sample
  DOMAIN (2)...(249): Glycosyl hydrolases family 43
  misc_feature (1)..(269): Xaa is any amino acid
MYFCPVAPIMKSFDLVNWKIVSYCADIIDDLPNFRLETEDQQRIGDYGRGQWASSLRYCNNRFWVLFTNNTTNKSYLYSAAYAESEKWDHLVLDRRFHDPSIFMDEDTGKMYIFHGYKEITLTEMENDLSEVKPGGIDKLILSEQDFPDCTGAEGSHAYKLNGFYYLFLIAFKSGRRVELCYRASDLEGSWEGKIVLDRGLGKRTGGVAQGGIVQTPDGDWYGFFFQDRGAVGRVPVLVPMQWDNEFWPVFGDSNGNIPLEFQIKQVQD

SEQ ID NO: 106778 - protein, 234 aa, Unknown
  Obtained from environmental sample
  misc_feature (1)..(234): Xaa is any amino acid
MVDYNSIPSPCYVLEESRLVRNLEILARVQREGGAKVICALKGFSFWKTFPLIAEYLSGATASSLNETLLASQMGKEVHVCAPAYRADEIEQILSHASHITFNSFSQWNLFKKETQKKGISAGIRINPEFSTVDVDLYNPAGRYSRLGVTKKEFKPEFLEGIEGLHFHALCEQNAEALEAVLARVEGYFGEWIPKMKWMNFGGGHHITRADYDVEKLINILKKVHKKYPGVEII

SEQ ID NO: 106779 - protein, 93 aa, Unknown
  Obtained from environmental sample
  misc_feature (1)..(93): Xaa is any amino acid
MYIADGIVYGDDRMPFKKVTDVRALEDYKLHLRFSTGEERIFDVKPQLKYQVYKPLTDKTLFNSVYLCYGVPTWQNGEIDFAPDTLYEEGKPY

SEQ ID NO: 106780 - protein, 85 aa, Unknown
  Obtained from environmental sample
  misc_feature (1)..(85): Xaa is any amino acid
DKIFVTTGRAPNTEGIGLGSVGVATAKGFIETGDYYQTGVKSIYAIGDAAAGAPMLAHVASKQGEIAAEHIAGSPPARPRIDPAR

SEQ ID NO: 106781 - protein, 110 aa, Unknown
  Obtained from environmental sample
  DOMAIN (29)...(102): Transcriptional regulatory protein, C terminal
  misc_feature (1)..(110): Xaa is any amino acid
KKGGKNEANDINTGAIRLNILKRLVTIDGAPIELTPKEFDLLYYLLLNQDITVSREQILDTVWGYDFEGDFRTIDTHIKQLRIKMGNHSSCIKTIHRVGYRFGGHNEKNN

SEQ ID NO: 106782 - protein, 125 aa, Unknown
  Obtained from environmental sample
  misc_feature (1)..(125): Xaa is any amino acid
SRGKTQIGVSEKESSQEGEPESTPRPVQARRQIPEFFAFPSWAAAVVEIEIDPVSFNPVTKGIWLAVDGGNILNEHRARLTIKTGAIQALGWASREQLRYEQGKIPVECFRDYSIPAPEEIPPIA

SEQ ID NO: 106783 - protein, 78 aa, Unknown
  Obtained from environmental sample
  misc_feature (1)..(78): Xaa is any amino acid
MRTFCVFVFALAIMFSMDIFMSLVSLVLIPVIVVFSTLYFRKVNVEFNRADIAEGQVQAASQENYTGVRVVRAFGRES

SEQ ID NO: 106784 - protein, 253 aa, Unknown
  Obtained from environmental sample
  DOMAIN (143)...(231): PPIC-type PPIASE domain
  misc_feature (1)..(253): Xaa is any amino acid
MSVMMSIWRQAFEEAAVRVGILDEMKQIGFIAPEDVVDREMAGLSIFQENGRFSSVKYRSLDNNSRMNLWRQVQENYIVQTYMSDLENINVASNEASFIASMASPRRSFDLAVFPLSSYPDSEVEAYVRSNPDRFSVVHLSKITITSGEREGRQVLDSIKNGTTTFEEAARNYSQDWAAERGGDMGTMMAYELDYEITDEKTRAGIVNLARGELSELTKNNAGWAIYRANEAVRPVDFNDASEKSKVRSYLMS

SEQ ID NO: 106785 - protein, 277 aa, Unknown
  Obtained from environmental sample
  misc_feature (1)..(277): Xaa is any amino acid
DFRSGRHIGTGIASGTNTGDLSIAIEKGRNLLDVFRVETIPEAMAEIRRRCNNNGEIDNSRIPDFKGIMIGDYLDLPSLNDGTTNFVWNADYKNLRMLVSGFNIYKGAADTENTDNHILFSFRNCVTTRQMNTTDSNTGGYAATAMKTYLDGVFATGLRTALGGDYLYPVYRLLSVSDSAAWAWNLNTVFLPTECEVWGAPIWGSAEKHEGGFQCQWPIFRETVYKGKKHNGSRMWWWEASRRPSTAYFCYVSHAIDADTGHASSALGGVAPGFCVR

SEQ ID NO: 106786 - protein, 227 aa, Unknown
  Obtained from environmental sample
  DOMAIN (7)...(224): Polysaccharide biosynthesis protein
  misc_feature (1)..(227): Xaa is any amino acid
MRKLTNILVTGGAGFIGCNFIRFLLEKADGFSGRVINLDALTYAGNSMSLADIETKYAPQGDIKGRYFFEHGDICDRAFVESLFRKYEIDTVVHFAAESHVDRSILGPEAFIKTNVTGTFTLLDVARNVWKDAQPGQDTLFHHISTDEVYGSLGETGYFTEKTPYDPRSPYSASKAASDHLAMAYSHTYGLPVTLSNCSNNYGPYQFPEKLIPLMILNMLEGKPPAG

SEQ ID NO: 106787 - protein, 140 aa, Unknown
  Obtained from environmental sample
  DOMAIN (1)...(140): Fumarate hydratase (Fumerase)
  misc_feature (1)..(140): Xaa is any amino acid
MCITAAHDLPADVLSRIREARADEPFPRAQGILDSIIENAGIASTRRIPICQDTGTAVFFVTLGDGVRIEGGGLLDAINEGVRQGYADGNLRSSIVDDPVFDRINTGGNTPAVTHVDLASGDKLSVTLLPKGGGCENMSA

SEQ ID NO: 106788 - protein, 281 aa, Unknown
  Obtained from environmental sample
  DOMAIN (1)...(279): Dipeptidyl peptidase IV (DPP IV) N-terminal region
  misc_feature (1)..(281): Xaa is any amino acid
DGEEYFSWGGEYYATDNETNVDKKKNKDKRYSCGAIWSPDSKHFAIVRDDEREVDELWVINSIADPRPTLETYKYHMAGEPNAPKQYLYLFENAGKTSKIVETSAFKDQTLGFFYRPILEKDRSNDYNPVVWLGYNDKFYINRTSRDLKRIDICEINVNSAACKAIIEERLNTYVELRPLRIVEGTGELIHWSERTGWGHYYLYDAKGNLKNAITSGPYHCESIAGIEPKTRTLFFNANGRETGENPYYEHLYSVKLDGSGLKLLNKGDYFHSTRMNDNCT

SEQ ID NO: 106789 - protein, 92 aa, Unknown
  Obtained from environmental sample
  DOMAIN (1)...(91): Glutamate/Leucine/Phenylalanine/Valine dehydrogenase
  misc_feature (1)..(92): Xaa is any amino acid
GQVFLDAKVSFGPGKAANAGGVATSGLEMAQNSQRLSWTFDEVDEKLHQIMINIHTSAKDAAAEYNTPGNLVNGANIAGFLKVARAMLAQGV

SEQ ID NO: 106790 - protein, 169 aa, Unknown
  Obtained from environmental sample
  DOMAIN (11)...(169): Cation efflux family
  misc_feature (1)..(169): Xaa is any amino acid
MDKIKGGYVEGTTSIIVNLVLFALKFWAGIITGSLALEADAWHTLSDSISSVVLVIAAKLMSKKADKEHPFGHGRWEQVAALFIAFILGIIGYDFLKQSIIQFRNRESVHFGIIAIVVTVASILVKEALAQYAFYIARKTGSTSIKADGWHHRSDALSSVVVLVGIFLA

SEQ ID NO: 106791 - protein, 254 aa, Unknown
  Obtained from environmental sample
  DOMAIN (1)...(253): Phosphoglucose isomerase
  misc_feature (1)..(254): Xaa is any amino acid
MNAKFISNVDPDDASAVIASVPLDQTLFILVSKSGTTQETLANELYVKNKLEKADLDSAKHMIAVTSETSPLANNPAYLESFYIDDYIGGRYSSTSAVGGCVLSLAFGRAAFREFLTGAEEADKLAMEPDITENAAMLDALIGVWERNFLGYPYTAILPYSQGLSRFPAHLQQLDMESNGKQVNRNGQPIAYNTGPVVFGEPGTNGQHSFYQLLHQGTSIVPLQFIGFTLSQRGADVIVDGSSSQTKLNAHLAA

SEQ ID NO: 106792 - protein, 109 aa, Unknown
  Obtained from environmental sample
  misc_feature (1)..(109): Xaa is any amino acid
MDLNENEIGTIVVDTAFNLHKKLGPGLLESVYEVILMKLLSKNGLSVQRQVSIPIEYEGEFFDEGFRIDLFIEGKVIIELKSVEKITGAHKKQLLTYLTLTNTKLGYIL

SEQ ID NO: 106793 - protein, 276 aa, Unknown
  Obtained from environmental sample
  DOMAIN (185)...(266): Fibronectin type III domain
  misc_feature (1)..(276): Xaa is any amino acid
TGEQEITISYGGKTVTITVTDNPLESIEITTPPTKTRYNIGEDLDLDGMVVTAAYSDGATEEVTTGYTVSGYDNTTAGNKTITVSYKDKTAEFNINVIDPSRETVATPTASPGAGDYHEAISVTLSTTSGATIHYTLDGTTPTVSSTVYNSSFLISHSSLLKAFAVKEGMNDSEILTAEYTFSFASSPALTLTPDNQKITYTWTASSPAADSYDLYWKAGDNVSATALKNTGTKISPATSGGTITGLTNGTAYSFIVTANKTGYPSVDSAVQTATP

SEQ ID NO: 106794 - protein, 292 aa, Unknown
  Obtained from environmental sample
  DOMAIN (201)...(291): Histidine kinase-, DNA gyrase B-, and HSP90-like ATPase
  misc_feature (1)..(292): Xaa is any amino acid
ILGKNDIDALGLPPETAAIAAESDVKVMNEQQRIVYEEWIPCSDGVKRLFEMVKSPLILDDDVVGIMAIGRDITRRKEMEEEALSANRAKSSFLANMSHELRTPLNVVIGLTDLTLEEDLDKHIMDNLAKISNAGSTLLSIVNDILDFSKIESGKLIISPVEYYMSSLLNDIITLVLTRLGEKPITFKLNIKDNLPNKLLGDDLRVKQIFTNLLTNAIKYTREGSIELIVRSTREGDKLWLDVAVSDTGMGIPKEDISSLFLDYYQVSANATRNIEGTGLGLPITKTAVEMM

SEQ ID NO: 106795 - protein, 98 aa, Unknown
  Obtained from environmental sample
  misc_feature (1)..(98): Xaa is any amino acid
MNKDLSYVLVTPYTIAKSRTGGVVSRLLSRTDLELVGAQMFTPDEAFAMEYAQNLRKRSPQNQIMLLADYVEQKITPSGGRPHRTLLLLFRGENPCEK

SEQ ID NO: 106796 - protein, 150 aa, Unknown
  Obtained from environmental sample
  DOMAIN (4)...(130): Peptidase family M48
  misc_feature (1)..(150): Xaa is any amino acid
AGVIAHEVAHIQLKHSIKVIKNSRIAQALLVTGASAVGAATRMDVKELTDIMNESVGEIVQTLINSGYSQAQEFEADNTALSLMAGAGYNPSGLIEMLKSLSSVQTAGVGFGKTHPSPAMRITNAKRSVKKYKVTDTGALRNARFTVESK

SEQ ID NO: 106797 - protein, 130 aa, Unknown
  Obtained from environmental sample
  misc_feature (1)..(130): Xaa is any amino acid
MKRGVILLCLVLFVTDFAAAQIFAGRTLYVSVKTLTLKSDTGFFADSNGTLEYGDRVTVVRVDGKFVEVKSAAHSSLTGWTATANLSAKQVVPGSSHTVSAKEVALAGKGFSQEVENTYKNQENNLNYAD

SEQ ID NO: 106798 - protein, 273 aa, Unknown
  Obtained from environmental sample
  misc_feature (1)..(273): Xaa is any amino acid
LFLDTCISDMNLHIGQTLKLDDFYIPILGVNDFPMETYPSILHELNKSYVEYRWVSRFFPMEKTEAMKELDKWQGKHHGARKSTKQLMAEMAMNVETHKENIGAGELERDVGEAMKELTMDFVGLGYYNSCIMVWDMDYEKAMAKLMSLRTIIESSGFTCKEETFNAYNAFLGMSAGDVYRNIRRPMISSGNYAHVLPLSAVWAGMIQNRFTNEVCGVDAPLVTCSTNYGTPFFLNLNDGDVGHSLIFGPTGAGKSTLLGLLAISHLKYPLGQ

SEQ ID NO: 106799 - protein, 283 aa, Unknown
  Obtained from environmental sample
  misc_feature (1)..(283): Xaa is any amino acid
FVCAKKLLLIPDLLNYFFTGRCYSEVSEASTSQLLDVRTMQYSEEQCQKHGIDPGLFYPVAVHGTLIGNMLPELLKEAGVLYDIPVVCVPSHDTTSAVMGTPAEEETFLFISAGTWVLIGIHCKEPVINENVLRHRFTNEVGAFGHITLLKNSIGLFIFQKLQSGYSAEGREMSWDEFEELAVSYSGPPLVFDVNHADFFNPPNMDTAIQDYLIRSGQINEPISREAVISAAYVSLAASFVVGLDAVNEISDTKLRKAVIVGGGSRSKKLIQLVADISGMEII

SEQ ID NO: 106800 - protein, 193 aa, Unknown
  Obtained from environmental sample
  DOMAIN (1)...(173): Branched-chain amino acid transport system / permease component
  misc_feature (1)..(193): Xaa is any amino acid
GGKFLYNIPRYFWRLADAKLFADSVNPAIGLSIVTVLWFLLAIVFSLMLRYTVIGRSIYLIGCNRPAAQRAGVNLLKTTLFIYGVTGAISGIASIVHVSIVQTVTPSSIVGQEMQVIAAVVLGGASITGGRGTIAGTVLGVLLFSILSNALTLLKISSYWYNVFIGIIILGSVIINAVQEIRQRKFIVRVNVI

SEQ ID NO: 106801 - protein, 88 aa, Unknown
  Obtained from environmental sample
  misc_feature (1)..(88): Xaa is any amino acid
MSKLNSLMLYLQKQQKGQQFSLIVTLVLVYAFMAFMNGSRFLSLYNLSSMAYQLPLIGFLSIGMMISELSGGINLSIIANANFYGIII

SEQ ID NO: 106802 - protein, 245 aa, Unknown
  Obtained from environmental sample
  DOMAIN (81)...(245): Peptidase M16 inactive domain
  misc_feature (1)..(245): Xaa is any amino acid
MSVYGDAVFRPLLSEWNFMQEGHRLEFDGNGKLTQTGVVYNEMKGAYSSLDTYAGLWSVKAIMPGTPYEFESGGDPDCIPQLTLESLREFHRRRYSPANCKIFLAGNIPTEKQLAFINDKFLSKLEGGSALPAIEKTKRWNEPREFVIPCPTGGDSKLTVFISWLCSDVIDINESVALVALAEILLSHDGSPLTRALIDSGIGEDITPVSGLEGEIRETLFTAGLRGVDDAEHAGKKSEELITGT

SEQ ID NO: 106803 - protein, 93 aa, Unknown
  Obtained from environmental sample
  DOMAIN (14)...(93): 6,7-dimethyl-8-ribityllumazine synthase
  misc_feature (1)..(93): Xaa is any amino acid
MTAPCTIIEGRMEAAGLSFAILAARFNDFIVDRLISGAIDYLVRHGADPSRITVIRTYGAFEMPLVCQKLAASGNYSAIVALGAVIRGATPHL

SEQ ID NO: 106804 - protein, 180 aa, Unknown
  Obtained from environmental sample
  DOMAIN (3)...(148): GTP cyclohydrolase II
  misc_feature (1)..(180): Xaa is any amino acid
ENDVSPDTHLAIIKGDLGGSDPVLVRVHSECLTGDALGSLRCDCGEQLGAALTQIEREGRGVLVYMRQEGRGIGLGNKIKAYALQDKGLDTVEANEELGFRPDLRDYGVGAQILVDLGVRRMRIMTNNPRKIIGLEGYGIEITERVPIEMPPRPDNIDYLAAKQEKMGHLYPHPLSNCKI

SEQ ID NO: 106805 - protein, 277 aa, Unknown
  Obtained from environmental sample
  DOMAIN (152)...(277): RibD C-terminal domain
  misc_feature (1)..(277): Xaa is any amino acid
MNACAFAPAMDEAIRLARNGRWKTAPNPAVGAVLVRDGRIVARGWHEACGLPHAEIVCLEDAAKNGVNPADCTLVVTLEPCNHQGNMPPCTEAVLAAGIRRVAVGLPDPNPVAAGGIARLRAAGVQVDTGVCEDACRDLAADFLVWQKFRRPFVVLKLAGTLDGRIATRHGHSRWISGEASRARAHELRAAVGLRGGAVLVGANTLLADNPLLTARLEDRPVTRQPLAASVISRLTMADGLKVVQERPEETIFFSSAAAAASPAAAGLRKRGVRVIG

SEQ ID NO: 106806 - protein, 271 aa, Unknown
  Obtained from environmental sample
  DOMAIN (45)...(271): Glycosyl transferase family, a/b domain
  misc_feature (1)..(271): Xaa is any amino acid
MDGELSPSQAGALLLGLRAKGETPDEVEEAVKAVLARAVPVPPISGPAMDIVGTGGDGKYSFNCSTATALTLAGMGYKVLKHGNRSVSSRCGSADVLEQLGIPLDTPPEAVADTLEREGFVFLFAPRYHPAFRHVMPVRRELGVRTLFNILGPLVNPARPTHHFLGVADRERLPLVAAALARSKPEAGVVVHGAGNYDELTPMGEAALIFVHGAESRPARLDPAEYGIAPCAEQELAVEGPEHAAEVLRRVLSGQGSKAVADMLTLNLGLA

SEQ ID NO: 106807 - protein, 119 aa, Unknown
  Obtained from environmental sample
  DOMAIN (1)...(115): TatD related DNase
  misc_feature (1)..(119): Xaa is any amino acid
GHSPRSSAAKGGVLHCYSEDAAYAEKALELNLYFSFAGNLTYKNAKNLHETLSVLPVDRILIESESPFMVPADYRGKRNMPKYLPLTARFMANMLDMDEEALAAQLWENSNKFFGLPSE

SEQ ID NO: 106808 - protein, 101 aa, Unknown
  Obtained from environmental sample
  misc_feature (1)..(101): Xaa is any amino acid
MGFYRPVKIGSLELTGNLFLAPVAGYTDRAFRSICAEEGADFSFTELVSAEALYRNFGRYGLGVDTGESSSGNTAAINLVRRGEKRKHYAIQLFGAESESI

SEQ ID NO: 106809 - protein, 261 aa, Unknown
  Obtained from environmental sample
  DOMAIN (194)...(261): Glycosyltransferase 36 associated family
  misc_feature (1)..(261): Xaa is any amino acid
MQYGHFDAQEREYVITRPDTPAPWANYLGSPAYGAIISNNAGGYSFVKSGAAGRLIRYRFNEQDRPGRYIYLRDDESGDYWSASWQPVGKDLEYYRSVCRHGTGYTIMEAEYKGLRSEACYYVPLKAAHEVWRLKLTNTGTAERKISVFGFVEFTCESFYEQDQVNLQYTQFITRTYFKNQFILQTINENCLNAVNESRVETRFFGLAGTPVTSYCGDRAAFLGGYRDYGNPISVEKGRLDGTLNYNLNPCGALHTALTLK

SEQ ID NO: 106810 - protein, 137 aa, Unknown
  Obtained from environmental sample
  misc_feature (1)..(137): Xaa is any amino acid
MSVNPSKPVKLRSATVTEGRRMAGARSLWRANGMTDAQIGKPVVAVVNSFTQFVPGHVHLHDVGQHIKKIIEAQGCFAAEFNTIAIDDGIAMGHGGMLYSLPSRDLIADSVEYMVNAHCADAMICVSNCDKITPGMM

SEQ ID NO: 106811 - protein, 117 aa, Unknown
  Obtained from environmental sample
  misc_feature (1)..(117): Xaa is any amino acid
MHNAKFIVPNAFTSLNFLLGVASICWSAGLFVSQDHIVMGAHFIIFCALLDKLDGFAARAFNASSEFGAQFDSLADLIAFGIAPAFMIMFAYKDMSPNWYESHRLALFAGSAIYMVC

SEQ ID NO: 106812 - protein, 149 aa, Unknown
  Obtained from environmental sample
  DOMAIN (2)...(115): Response regulator receiver domain
  misc_feature (1)..(149): Xaa is any amino acid
MKTIFVVDDSDTCLSKVEEVLESQYSVMTLPSAAKMFAMLEKIVPDLILLDISMPEMDGYTALDLLKKNPKTANIPVIFLTGQADALVEARSFDLGVIDFIVKPFSALVLLNRVKMHIDMDGVIRERTEHLEQRTKHMESLYDNIVSIL

SEQ ID NO: 106813 - protein, 156 aa, Unknown
  Obtained from environmental sample
  DOMAIN (33)...(156): ABC transporter
  misc_feature (1)..(156): Xaa is any amino acid
MSLIEINKVNKFFGQGPGRVHVLKDIDLAVERGDFVAIIGQSGSGKSTLMNTLGCLDTPTSGSYRLDGLLTGGLSPDAQAWLRGRKLGFIFQRYNLLPSLSSLDNVALPAVYAGLDQAARRTRAEALLTRLGLADKFENHPHQLSGGQQQRVSIAR

SEQ ID NO: 106814 - protein, 119 aa, Unknown
  Obtained from environmental sample
  misc_feature (1)..(119): Xaa is any amino acid
ATAAGTAVYYYGKLKADNPDGTLRIGMTTQNTIVIDEVRGALMVPSIAVSPTGRGTALVRVLKKGRPADRAIKIGLSDNMNTEVLSGLDEGEEVVAAQMSAAEVENAATIRMRGGPPRF

SEQ ID NO: 106815 - protein, 280 aa, Unknown
  Obtained from environmental sample
  DOMAIN (176)...(235): KH domain
  misc_feature (1)..(280): Xaa is any amino acid
IENLSRKMIEEAQRDVVSLKKEATLQGQDIIFQMKAACDKELAEKKREQKKQEDRLSQKEEHYERRAEQLAQREAAVARQEVELVKAEKKSQALAEELSLLEAERIKALEKTAALTAEEAKELLMTNMAEEARHEAAKFIRLVETEARETADKKAREILALAVKRYAGDYVAEHTISVVPLPNDDMKGRIIGREGRNIRAIEAATGVDLIIDDTPEAVILSGFSPLRREIARQSLERLIADGRIHPARIEEIVAKVTEEMDRALKEAGEQAAFDVGVHGM

SEQ ID NO: 106816 - protein, 78 aa, Unknown
  Obtained from environmental sample
  misc_feature (1)..(78): Xaa is any amino acid
MLENIKRKLDAVNKLAQKTGEQKIIDLSKFLRDRISHPDSFVAMLGETSSGKTTLLNGFLGRNLLYTSVQPSTGAVVE

SEQ ID NO: 106817 - protein, 301 aa, Unknown
  Obtained from environmental sample
  misc_feature (1)..(301): Xaa is any amino acid
AQKIDQNDRDVLIKELKDTITQIETAKDQLVKPTFEKLVSVIPSKLSMAKTNVLNAIYQKIDESGKSQQQEIVAYVNAHMLQFETKKQMDEIRFYIEAKLTDLDKQIEDMLNKCFQKIEHTIELHFSVEAANIAKGIIKKYAGNVMEQSLLGYFKQFAGRGGTGIANGAKHLLKKVGDFFGRTFSRETHNKLATILSKIGATSAKAVGMAVAVVLELVFMAVDALTWQGSLKKKVTKGVEKWHDEVLTATKDNLNDLKRENLALLDGYIIDLQNDIDEYSKSDRNYEGIDELTTMLDATRM

SEQ ID NO: 106818 - protein, 221 aa, Unknown
  Obtained from environmental sample
  DOMAIN (13)...(221): Protein tyrosine kinase
  misc_feature (1)..(221): Xaa is any amino acid
MELKVNTKFDNRFELTKLLGSGGCSQVWLAKDTKVCDKDVALKIYVPETGLDNNAISSFRDEFDLIFEMNHTNLMRPAYFDICENSPYLIMPYCKKGSAKNLIGKKISEDEVWRFIHDIAAGLAFLHEHSIIHQDIKPDNILIDNNDAFLITDFGISTKIRKTLSMAANANKQQTMTMAYSPPERFGKDRTVTQINASDIWSLGATVFELVSGIVPFDERG

SEQ ID NO: 106819 - protein, 251 aa, Unknown
  Obtained from environmental sample
  misc_feature (1)..(251): Xaa is any amino acid
MKYLKVRKNRVLISVIITLIVYGILWIVTPIAAPENRVLILIGGRFPDGVIQALTFLPFTFGMLEIMWFNYSIDCEKNAKKVYSTDIKMLDDWSKIENKVISTDEVQKLKLSIQKVERENGKCKFTDLLIKCCQKYSSSKNPSEIIALNDSQIEIYQSQMESEQSFIRYAAWAMPSVGFIGTVFGIGQSLNLAKEAATEEGIKKITDALGVAFDTTLWALIGSIILMFAIHYIQEKQDSFFAELTEYIIDN

SEQ ID NO: 106820 - protein, 212 aa, Unknown
  Obtained from environmental sample
  DOMAIN (49)...(117): POTRA domain, FtsQ-type
  misc_feature (1)..(212): Xaa is any amino acid
MSTEYFYETSDTVITKKKSVEKGLKRLLIIAVIILAAELIWLFGVSPFIPFSSVEVHGFQGLSRQQILSLAGIDDNSSFFSTNVNALKEKLSSHILVESAVVIKRFPDKLSIFLNPRQAAAVTLANINSKQVMIYIDRYGVFYKIENGDLNEKTNIPIISGIENAGLNMRLPSALVPLVESLGRISVSSPELLSAISEIRIERKAWDGYDLV

SEQ ID NO: 106821 - protein, 267 aa, Unknown
  Obtained from environmental sample
  DOMAIN (13)...(260): Glycosyl transferase family 8
  misc_feature (1)..(267): Xaa is any amino acid
MSESDDTAQEPIHVVLAIHDPKGTYARHGGVVMTSMFEHTKSQICVHILHDQTLTDHNRSLLSETAESFGQHVVFHDVSFYMELLGDEAAQLTRKKWSLGTLFRLAIPDILPLDKVIYLDCDVVVNMDIQELWKVPLDGFSFAGALDKRHSQFSSDSFKRRLMGCDLRTYINAGVLLMNLPRIKEKLTPSGASLWFKRYRHYVKFADQDLINSCFRGDIKIIDGRFNNIYLSSGNFRRDTNVATGCIVHMAASKPWKHLKGSVADRL

SEQ ID NO: 106822 - protein, 262 aa, Unknown
  Obtained from environmental sample
  DOMAIN (106)...(172): His Kinase A (phosphoacceptor) domain
  misc_feature (1)..(262): Xaa is any amino acid
VDDKARVEYISKSFVELFGIEKQEYAIKLPFIDLFPTAELKLFFGELLHRRGEIAEMFEMEIGGKWHHFMLHSEALRDGGIARIFDCLDITPIVQAQRAAEAASKSKSNFLATMSHEIRTPMNAIIGIAQIQLQREDLPENYATALRKIYGSANNQLGIINDILDMSKIETGNMELNPVEYDTPSLINDAVQFNVVRIGEKQIKFIVDIDENLPSKLYGDELRITQILNNLLSNAIKYTGKGYIKLSVGYLTDSDGVTLRFV

SEQ ID NO: 106823 - protein, 255 aa, Unknown
  Obtained from environmental sample
  misc_feature (1)..(255): Xaa is any amino acid
LVVRPKDKSSGIGSKELTLIADEFLKRRLENVKGVGRVDLVGGAKREVGIRVDPLKMEALGITLPQIIGALGNDTVAVPTGNLRQATREIALRVDAKAKLVSDFEHVVVGNLKGRPIELQELATIVDGVEYPTTMALLDGQDAVSLELLRQKGGNTVEMVNNITAVLKSIKPELDERGVEVFKAKDNSWFITDSVHDVVVTIVLGGLITVLIVFFFLKSWRSTVITSLTLPVSIISAFIIMNALGFTLNTLTLMA

SEQ ID NO: 106824 - protein, 259 aa, Unknown
  Obtained from environmental sample
  DOMAIN (1)...(198): Pyruvate phosphate dikinase, PEP/pyruvate binding domain
  misc_feature (1)..(259): Xaa is any amino acid
DTELGAADLEKLVDEYKKIVKKYTGKDFPQAPLDQLWGAINAVFGSWMNERAIKYRQINDIRSLKGTAVNVQSMVFGNFGEDSGTGVCFSRDPSTGINEFYGEYLMNAQGEDVVAGIRTPERIHTLEKKNPVIYKQLVAIKNRLEKHFKDMQDMEFTVQQGELFLLQTRNGKRAGTAAVKCAVDMVAEGLIDKNTAIMRVTPGHLDQLLHPMIDSNALKQAKALTKGLNASPGAAAGRIVFNAKDAENWQARGEKVLLV

SEQ ID NO: 106825 - protein, 238 aa, Unknown
  Obtained from environmental sample
  DOMAIN (50)...(170): HD domain
  misc_feature (1)..(238): Xaa is any amino acid
DRKLYGAGGDAGCNGSSNSAKGDDGDQLVPTQNLIQRIQDEAHANLNLTRFLHSRQTALLCRDLCCRFRQDHPSLDPELGYLAGIAHDLCKLFSDKDQFRLAKEYGGEITRLEKEKPSLLHGKACAALLKERFKIQNKVLLEAIARHTEGHKDMGPLAKILYIADKMEVSRVKVDPAARNRILSGDTLDQIFLSVLERTISSLRTRKLEVSKETLGLLEKMGALDLLKEDGGGRNADK

SEQ ID NO: 106826 - protein, 187 aa, Unknown
  Obtained from environmental sample
  misc_feature (1)..(187): Xaa is any amino acid
MGILVSAIVGIVLTLPISSAALCAALGLVGLAGGAAVAGCCAHMVGFAVASYRENRVGGLLAQGVGTSMLQVPNLMKKPVLWIPAVAASLINGPVATVVFKLKMNGPPISSGMGTSGMVGPIGIMTGWFNPSEQALSMGQAAVSPAAADWIGLLLIAIVIPAAVSFCVSELMRNKGLILDGDLKIEC

SEQ ID NO: 106827 - protein, 248 aa, Unknown
  Obtained from environmental sample
  DOMAIN (151)...(217): His Kinase A (phosphoacceptor) domain
  misc_feature (1)..(248): Xaa is any amino acid
MVDNNGTFIAHPDIELVAGQFNPITKAKTDPSLKPVANMIETALKQRRGIFRYTYEKRNMIGCYEEVPDYPWLLFSLVEKDDVDNQLTAMRIIVLLASLAASAFLTWVLTYIGSRSVLISLKERERITREAIERRAEIEKLMNALKESSESRTVFLSNISNEMADPINNIIRLSSLLSKFTEFEEEHKKELEAINDEGMKLFNIINDVLDILKIEANKLKIKPVRYKLPKLISDITTQYSLLTEDKPI

SEQ ID NO: 106828 - protein, 99 aa, Unknown
  Obtained from environmental sample
  misc_feature (1)..(99): Xaa is any amino acid
MNFQYWQPEIEKMPRAQLEELQLKKLKEEIGFALRTPFYRERLGKAGIKTGEDIKTLDDLKKIPFTKKNDLRDGFPFGFLSIPKDEVVRLHSFSGTTGI

SEQ ID NO: 106829 - protein, 189 aa, Unknown
  Obtained from environmental sample
  misc_feature (1)..(189): Xaa is any amino acid
GILYNVPPIRTKDIPYIDVLSESLNNAVRLIIGWFCVTNVYQPPVSIVCGYWMGGAFLMAAKRFAEYRMIGDSSQAKLYRRSFGTYNEISLLLSTVFYGFLAVFFCGVFLIKYRIELLIFIPFLCGLFCYYLGLCFKLDSAAQKPEKLFREKGLMLYVGFLIALFVVLHYVNIPVFEMFLQSNLLRLPQ

SEQ ID NO: 106830 - protein, 282 aa, Unknown
  Obtained from environmental sample
  misc_feature (1)..(282): Xaa is any amino acid
ELIFIDDGQKDATLKILRQIAHNDTRVHYISFSRNFGKEAAMLAGLQAAQGTYTAVLDADGQDPPDLLPQMLEAVASGEYDCAGTRRTNRAGEPLVRSFFARRFYRIMKKFADIDVVDGARDFRLMNRRYMDALLSLPERNRFSKGIFPWIGFNTKWFEYENIKRLSGKTKWSFWKLLMYSLDGLTAFSSKPVVIVSVLGIILFLVALAVIIFIIIRKLVYGDPVAGWASTICIILFCSGIQLFTIGILGQYIAKTYTETKQRPYYIIREGAIKIKGLRKKK

SEQ ID NO: 106831 - protein, 219 aa, Unknown
  Obtained from environmental sample
  DOMAIN (20)...(219): RNA polymerase Rpb1, domain 1
  misc_feature (1)..(219): Xaa is any amino acid
MSLDELFTIRSTTTASTAGMQNLKGIQISVASPENIREWSFGEVKKPETINYRTFKPERDGLFCAKIFGPVKDYECNCGKYKRMKHRGIVCEKCGVEVIASKVRRERMGHIELAAPVAHIWFLKTLPSKIGTLLDMTMADLEKVLYFDSYVVLNPGNTGLARLQVISEDQCLQVTEHFGDEALTVGMGAEAVRGLLEELNLEKLPDRTARRIADHQEPD

SEQ ID NO: 106832 - protein, 235 aa, Unknown
  Obtained from environmental sample
  DOMAIN (132)...(215): GHMP kinases C terminal
  misc_feature (1)..(235): Xaa is any amino acid
MDLALRLADAHQFIFGKPGDLADYITGLTARSDQFLVIDEQGPSVTKIKSPFSRCKIIIMDSRVPRFGIDGELDARREDIKAGLVMLSQGREGASFREFAAMDLVESMGNLPEEIRRRSLHVVQEIRRVFGARDYLTRGDLADFSRVVFNSHESLRDLYEVSCPEIDWMVKRAQETIGVYGARMTGQGFGGCTYTIIKNEMVSEFKNRLDDYERIFGFRPAIYEVKLATGSKVVK

SEQ ID NO: 106833 - protein, 123 aa, Unknown
  Obtained from environmental sample
  misc_feature (1)..(123): Xaa is any amino acid
VKKHSIFRPLAAALLLLPSLLAAQSADSGQGDSLRRAYITGGEDINAMNAASEFRIGIQAYNRYAFNEAILSFERALAFRPGEAVIMDWLGKSYYRSGFENTALRQWRAAADAYGINSGPGMV

SEQ ID NO: 106834 - protein, 164 aa, Unknown
  Obtained from environmental sample
  DOMAIN (47)...(80): Tetratricopeptide repeat
  misc_feature (1)..(164): Xaa is any amino acid
EVVTVGHIPLRSYQCRITLALIYIKTNRAKMAEFELKRLKNAGFESASMYNAMAFSAYLQKRYRQAVDYYERALELDINNATAMNSMGFILVDRGFDTIKGLMLCRKAVDIRPQNAAYMDSLGWACYKCGDMAEARSWLQKAMACAPKENEIREHYRIVTGGAA

SEQ ID NO: 106835 - protein, 83 aa, Unknown
  Obtained from environmental sample
  misc_feature (1)..(83): Xaa is any amino acid
MAAGLCYSWAAKAVDEETLKLLQALADEQELIAKYKALLDGEVINTGEKRKVLHQLLRGEQGRPVIENGKNIGEFYRGELKRS

SEQ ID NO: 106836 - protein, 55 aa, Unknown
  Obtained from environmental sample
  misc_feature (1)..(55): Xaa is any amino acid
LEKQYNPATVEDRLYAEWLKKGYFHADPSSPKPKYSIVIPPPNVTGVLHIGHALN

SEQ ID NO: 106837 - protein, 158 aa, Unknown
  Obtained from environmental sample
  misc_feature (1)..(158): Xaa is any amino acid
VNARASVEIRFSEWINRASVAGAVSVYPAVPQGVAVRVVKNRLTVTPKEPFSGNTTYHVSVSAALQDLRGNAMARPIDVVFSTGAALDSGRVDGAIAALKQKVAVNRVMLFRVDSGWTDGRYFSPPEYATQTDSSGAFGFSYIKEGRYRIVAFVDQYR

SEQ ID NO: 106838 - protein, 280 aa, Unknown
  Obtained from environmental sample
  misc_feature (1)..(280): Xaa is any amino acid
AAFPYFRISSKNTTNAFFPNAARDLLAAVIAAFIREGKKDPAIKKEFFYNEKLKEFLDLSDPQMIMDLLADSPDANAVMSYISGDNAQSQGVLSEMYSIIREIFIGVFAEKGAFSMREFVRGKGNKTLFIEYDLSIGSMLTPVYRLMFDLALKEALGRNKPQGNVYLICDEFKLLPHLRHIDDGVNFGRSLGVKVFAGIQSIEQLYEIYGQSRGRNIAAGFSSVYAFRSNDTATRDFISGLFGKNIVLEKYQRLDNQIVEEKRNGQTVEDWDLNSLKIGE

SEQ ID NO: 106839 - protein, 84 aa, Unknown
  Obtained from environmental sample
  DOMAIN (8)...(84): Uncharacterised ACR, YggU family COG1872
  misc_feature (1)..(84): Xaa is any amino acid
MNNYFRVDGDTIKLEIKAVPGASKTEFAGIKDGRLRIRLAAAPEDGKANAELLSFLSKALGCAKRDLRLVSGEKSRLKVVELPL

SEQ ID NO: 106840 - protein, 201 aa, Unknown
  Obtained from environmental sample
  DOMAIN (1)...(201): Fumble
  misc_feature (1)..(201): Xaa is any amino acid
MIVGIDIGSTTTKAVSIQEGRVIHKIKTKALDAVTSATGAFGKMIVENGIKIGEIRQIMITGAGAGKLRDDLFGIPTGKADEIKSIGIGGMFLSGRKNIIIANIGTGTAIIDARNDGIFHLGGSGVGGGTILGLAKKLLSVSEFSGIMQLAEKGKLSQVDLLMEDIMETDLSFLNKESTASNFGKMLDGARSEDIALGLIN

SEQ ID NO: 106841 - protein, 213 aa, Unknown
  Obtained from environmental sample
  misc_feature (1)..(213): Xaa is any amino acid
MSDASYYLRHYFDPDMDHLTLKPRADAGGSADRYNLGYVQNAVSGQVLAEVVPLAETEKMPRSSVNPRFVRPTATLPQGPNTRVDPQYPQYLLADANGYVFYLDGLITVKKLLNVRGDVDFSTGNIFFVGDIAVHGNVRAGFEVQGNRILIGGMVEGGVIRARSDLALQGGARGGVSNRCLLSTGGNLRLPFAEKAELRAGNNIFIERTCQHA

SEQ ID NO: 106842 - protein, 252 aa, Unknown
  Obtained from environmental sample
  misc_feature (1)..(252): Xaa is any amino acid
MLPNLPQTVIAFWGTLKAGGVVVMLNPLYMEKEIIHHLGDSGATCLITLDLLWPKIKALRSKLPVRHYIITGIADSLSFPYNWIYRFTAERAANAPKIDFHEETLVPWQTMMSGTRRFCCGGDARPDAPALIQYTGGTTGLPKGVMLSHRNISANARQVLAILQQTEDTPHIFLSILPFFHVYGLTAALICPTALAATALPLPRYVPRDVLAAIKKHRPTLFPGAPSVYISLMQQKNLAAYDLKSIQFCVSG

SEQ ID NO: 106843 - protein, 285 aa, Unknown
  Obtained from environmental sample
  DOMAIN (2)...(284): Borrelia P83/100 protein
  misc_feature (1)..(285): Xaa is any amino acid
NEGPQARIETREQIRQIGAVLGQAIKARQTRTGTNNRYFVIHSVTAADGDKLDADIFGLGSNAGVDHIRNLRTIIQGYLQEAYGYTASDAALIAEYVTIYNAVYRGNWNYFTGRFKKPVMDNLNRDSAGLAVRYQEWPGKTLMLIPLNAGGLSSINTSAISDNRVVERMQTEDNKGIPQRQGMVDLKEREAAQARQDAADKRDAAKAEEAAIAKDRQTLNEQQRQAERDRQQLEQDKASGKVTGEEAAKRDAELARREAETSNKSDELDQRDNNVAAQRQDAANQ

SEQ ID NO: 106844 - protein, 132 aa, Unknown
  Obtained from environmental sample
  DOMAIN (9)...(130): Glycoprotease family
  misc_feature (1)..(132): Xaa is any amino acid
LADYAGDSGLHSQMLPPRVAGMLEDNALAPGQVDLLVVGRGPGSFTGLRTGLALAKGLAWGAGRPVLGLGTLEVLAAQILAAEPDPEVLAAPVIDARHGEVFTALYGRKGQVSPPAARPPGELPAFWGAAAP

SEQ ID NO: 106845 - protein, 275 aa, Unknown
  Obtained from environmental sample
  DOMAIN (1)...(73): Helicase conserved C-terminal domain
  misc_feature (1)..(275): Xaa is any amino acid
KVFDPAPKGKIKAIISTNIAETSVTIDGISVVIDSGLSKLNYYNPRTFTSSLVEAPISKASANQRKGRAGRTREGTCYRLYGRKDFENRQLFTTEEIYRTDLSEVVLRMADLGITSFEEFDFISPPSKEGLIAAIETLDLLDALESDHSLSNTGRLMTEFPLPPRHSRIIVEAILKYPYVIKETIIAAAFLSTQSPYLLPPGEETDARQAHHRFRDEDGDFVSYLKLYAAYMESSSKQKFCEKNYLDERAMAEIANVTNQLEEIVSHLKIPILSG

SEQ ID NO: 106846 - protein, 80 aa, Unknown
  Obtained from environmental sample
  misc_feature (1)..(80): Xaa is any amino acid
VKLTTEHTKEFIQALEGVKSIQVSEDSSVDMGGCVIETDFGEIDARISSQLAELESKILEVSPIKSKPKSLPRSSVKTET

SEQ ID NO: 106847 - protein, 241 aa, Unknown
  Obtained from environmental sample
  DOMAIN (70)...(103): Tetratricopeptide repeat
  misc_feature (1)..(241): Xaa is any amino acid
VNSATGESEIISSVYSDLKRFEDFTSVHDKVVGAMFTIANAKKPATPEPEQEPAIALEEGGGASASGTDASYYYKQGHAFSQSNDHDGAIANYTEALKLDPRLVYALIARGSAYYSKGDYQSAVEDYSRSIELEPNDAGVFNNRGNAYRQMGNYDMARADYQAALRIDPNNAEARQSLELISLDKSGEEQSGQYTREKYGMHYGVTGGLHLDWLGFDGNHDYHDYPTIYNRYGGYDYWGYG

SEQ ID NO: 106848 - protein, 257 aa, Unknown
  Obtained from environmental sample
  DOMAIN (174)...(242): Elongation factor Tu domain 2
  misc_feature (1)..(257): Xaa is any amino acid
AGDPIQVVEDEKTARSISSKRQELKRFEDSKTVRKITLDNLADTINEGAIQELKVIIKADVQGSAEALRSSLEKLSTKEIRLHVIQALPGAINEGDVDLSIASNAIIIGFNVRPVPKAKTLAEQEKVEIRRYNVIYKAVEEIKQAMEGMLKPETKEEIIATVEVRDTFKTPKFGVVAGCYVLTGTVKRSAGIHIIRDNIEIYTGKIGSLRRFKDDVKEVAAGFECGIGLEGYDDVKVGDQFEVFEMVEIARKLSASS

SEQ ID NO: 106849 - protein, 292 aa, Unknown
  Obtained from environmental sample
  misc_feature (1)..(292): Xaa is any amino acid
VLVVIAGFLNAQEFGFGFGDDSDDSNDIGFGGSAAALTVTVGGEVSASLLGYFDDFSKGADHTQLGDVFSGKLNFSAGTSFADGVIKLKLQTTQQPVTIDEAYVRAYFGGLEIEGGLRKLTWGKADSFGPLDVINPLDYSELTDLGNIMNLKIARPLIHASYRIGSFSKIEALFVPTFEPLRFAEEGRWVPAQMAQLNQLSELADTMADMLPPGTLSPDFKININRPDISTIEYAQAGARFTTTIGPADIGLQYYYGRITRPVPTFTYTKPQAFTPPLDISAAINLDYNPYH

SEQ ID NO: 106850 - protein, 137 aa, Unknown
  Obtained from environmental sample
  misc_feature (1)..(137): Xaa is any amino acid
VSIQQFIDKKLDKYGVVILPKMEAKESMQFISSLGYRPTTTILDPWYNRGIGGVRDDYIPYILNIIDSIKDNTNHLFLWGFPEIAANFVNKVDKPLEFVTWLTWFFKNCPSVIRGWRSSQQACLHYATKEAKMHPEN

SEQ ID NO: 106851 - protein, 66 aa, Unknown
  Obtained from environmental sample
  misc_feature (1)..(66): Xaa is any amino acid
MADPVKILIVDDSKVFRTILEKIISGIAGVQVVGTADSGITAIEFLRMRTVDLMTLDVEMPGMDGL

SEQ ID NO: 106852 - protein, 74 aa, Unknown
  Obtained from environmental sample
  DOMAIN (12)...(74): Protein of unknown function (DUF497)
  misc_feature (1)..(74): Xaa is any amino acid
MNSEREYEIKKMKFEWDPEKDQKNFRLHGIHFETAAQIFLDPFRMERHDDVTSNEEDRWQTLGFFNNVLFVGIQ

SEQ ID NO: 106853 - protein, 75 aa, Unknown
  Obtained from environmental sample
  misc_feature (1)..(75): Xaa is any amino acid
GDLKKIESALKSQLVSALKGGVELKAGKNLGGGFHIVEKDGAAYYDFSAQTVAKLLSAYLNPRLAEILSNAAKGN

SEQ ID NO: 106854 - protein, 78 aa, Unknown
  Obtained from environmental sample
  misc_feature (1)..(78): Xaa is any amino acid
MNTVMNCYIESRNTDPARNLALEQFVFDNLDRGGSYFMLWQNNNAIIVGKHQNTNAEINAAFVKAHNISVVRRLSGGG

SEQ ID NO: 106855 - protein, 86 aa, Unknown
  Obtained from environmental sample
  misc_feature (1)..(86): Xaa is any amino acid
MKTKAVRLHGVNDLRLEEFELPKIKDDEILARVVSDSICMSSHKLAVQGAGHKRVRHDLSQKQPIIGHEFCGIIEEVGAKWAQKIK

SEQ ID NO: 106856 - protein, 287 aa, Unknown
  Obtained from environmental sample
  DOMAIN (1)...(64): His Kinase A (phosphoacceptor) domain
  misc_feature (1)..(287): Xaa is any amino acid
SRFLARMSHEIRTPMNAVIGMSDLAMMNYGKPEGLECIANIKQAGNNLLSIIDGILDLSAVESGKLSIKKAPYKMAAALSDVLAVIRMRLEDKASVKLSLDIDTRIPAELIGDETRVKEILTNLLSNAVKYTQKGFIKFAVKSQSDKRGNVFLTFDVSDSGIGIKPEDLDALFADFSRIENKYTTGIQGTGLGLAITRALCRAMGGNVVVKSEYEKGSTFSATIRQDVSDFSPMGTFIESSAPIDEAAVHADFSAPSFRVLIVDDILTNLKVAEGLLAPYQMQIDTC

SEQ ID NO: 106857 - protein, 110 aa, Unknown
  Obtained from environmental sample
  misc_feature (1)..(110): Xaa is any amino acid
MGPKKHLGQHFLTAPTFAKRIADAVPALTDGHVLEIGPGRGALSVHLLERFPFMHLVEIDTDSINTLTSKLGNGGYRIHNEDVMSFDFSKGGFPLHVVGNLPYNIGALII

SEQ ID NO: 106858 - protein, 287 aa, Unknown
  Obtained from environmental sample
  DOMAIN (1)...(107): AIR synthase related protein, C-terminal domain
  misc_feature (1)..(287): Xaa is any amino acid
LEATLEILDLDLVVGLQDLGAAGLTSSAAEMAGRAGNGLYIDVDKVPLREDGLAPWEIMLSESQERMLLVVEPEKVPEILKIFDKWDLAAAAIGEVTGDGFFTVRRGLATLARVPAGLLTDRAPVNLRPAREPAYFQALKKADFQAVLNYGDWGGLLTRLLASPNISSRRWVYEQYDHMVGLNTVVRPGGDAAVLRLPAAPRGLALTCDCNSRYVYLNPRLGGAIAVAEAARNLAVTGARPLALTNCLNFGNPENPDIYWQFVQATDGLAEAARALDTPVTGGNVSF

SEQ ID NO: 106859 - protein, 145 aa, Unknown
  Obtained from environmental sample
  misc_feature (1)..(145): Xaa is any amino acid
HRQIVDSLGETSDGTDIVYLCGFDVYSALVAKAATLNNSDLIKVFDTYVQIGTVKFIICSAKYYSYKNKTNVKAIPAKSVVAIAKDDSFSLAYCALDSADANFASLAFYINAVKQDDPEAMKLIGQSRPMPIPNVDAIRIAQVLE

SEQ ID NO: 106860 - protein, 157 aa, Unknown
  Obtained from environmental sample
  misc_feature (1)..(157): Xaa is any amino acid
MLFAEFAKGWWDPKTCKYLQWRQVQNPLAPSTIDHYKTNLDLHIKPYFGKMRLNAITTEIIQNWVTRLSLEGYNNSSINIQIATLKAMLSEAVRLKLIHSNPAENIKKLKAHNREVQILKPEEARLLFPSDWRAIWDSYEVFVFNKLAAGVPAMRLS

SEQ ID NO: 106861 - protein, 273 aa, Unknown
  Obtained from environmental sample
  DOMAIN (13)...(131): Type I restriction enzyme R protein N terminus (HSDR_N)
  misc_feature (1)..(273): Xaa is any amino acid
KFSQFCYNYHIMPRNEAQTRFDLIDPALFQRGWTRDHIKVEHSTGGIFINDKGKAIRRKGRTDYLLRLIIKKDTQPHAIALIEAKAEDKSPGAGLEQGKRDGDFNRLNVKFIFSTNGHQFVEYDKFSGIISKPRPINEFPTHDELRKRYEKYMGIDMEAENAKPLLIKYANGEDQRRYYQDAAIRAVFENVAQGKNRALLSLATGAGKTFIAVNLLKRLDTAGQLKKALFICDRDELRNQANNAFMGLFGSNAAAVENKNPQKNAKVIIATYQ

SEQ ID NO: 106862 - protein, 102 aa, Unknown
  Obtained from environmental sample
  DOMAIN (4)...(100): Oxidoreductase family, NAD-binding Rossmann fold
  misc_feature (1)..(102): Xaa is any amino acid
MKTIGIGIIGCGFMGKTHSFGAKTIPLYYDNIPFLPRLVGVCGSHPDAALAMKERNGFELATSNLDELLSRKDIDVVTVSTPNVFHKDNILAALAAENIFMP

SEQ ID NO: 106863 - protein, 183 aa, Unknown
  Obtained from environmental sample
  DOMAIN (8)...(137): Thiamin pyrophosphokinase, catalytic domain
  misc_feature (1)..(183): Xaa is any amino acid
LLGIVFTGGESPSSGIIRRLLNGKEIFVIAADSGLITAEESGYKPAFVIGDMDSLDDSSKLAAYPPERVIRYPHDKDYTDTELAFSLALEKGCDDIWLIGGGGGRIDHLFAIRSLFERAFFPRRWITDAEDIHCIDSKARQNELSLNLEKGAAVSVFPLGSGPWKAASKGLKWPLDDLTGIAV

SEQ ID NO: 106864 - protein, 278 aa, Unknown
  Obtained from environmental sample
  DOMAIN (240)...(273): Tetratricopeptide repeat
  misc_feature (1)..(278): Xaa is any amino acid
YDEEININVNDDNVNDFAVSIAINGETAHITDYTGTDTVISIPAVINDLPVVSIDARAFFGKGLTGVTIPDSVKIIGDEAFAKNQLSAVIIPDSVEYIGEKAFADNALANVIIPGKITVIRKETFMNNLLSAITVPNGVNYIEERAFAKNNISQIFIPDSVAAVGNWVFNLKDDAVIRIGATVALNQSFDYDFTEIYNKNNRIAGIYRHIGSKWQFTALTAEEQANAVKAREERPLPAVSFVWNDRGRYRYSQGRFTEAITDYTEAIRLNPRWTLPLY

SEQ ID NO: 106865 - protein, 276 aa, Unknown
  Obtained from environmental sample
  misc_feature (1)..(276): Xaa is any amino acid
TSETFIHPSFAFLAAAVLLPLIRSRYLRKVVLLLPPLLAVYAAFTNPLGQHLTVTWLGQTLILGRLDALSGLFIQVFSIMSLAGLVFSLHVDDPAQHASALLYVAGGLGAVLAGDYLTLFVCWEAMAVGSSLLVFMNRTRESVLAAFRYFLYHIFGGLFLLAGLVLRHQALGTFEFTALPGLTQGTAAFYDWLILLGFCVNAAVVPLHAWLPDAYPRGTVTGSVFMCAYTTKTAVYVLMRGFAGWEILAVAGTVMAVYGVLYASMENNARRILSYH

SEQ ID NO: 106866 - protein, 200 aa, Unknown
  Obtained from environmental sample
  misc_feature (1)..(200): Xaa is any amino acid
MPFENSAFPVLTVLTFWPTAAALGLAFVKDETAVRRFTLAASLVEVALAWPLLGFQKTAGYQFVELLPWVEDWGLQYFLGVDGISIMMIWLSILTLPVCVLCSWTYIGRRIKEFHVCLLLMTTACVGVFSALDLALFYVFWEALLIPMYLLIAVWGGDDRRYASLKFFLYTLAGSTLLLAAVAALRIQGGTFSIPVLAAE

SEQ ID NO: 106867 - protein, 152 aa, Unknown
  Obtained from environmental sample
  misc_feature (1)..(152): Xaa is any amino acid
MFIREYVLKHRDEEVLEFTIDKETKYVDNLHVYDNRFSPINSKASEGGKIASFNNWLHNRCISDSREGAEYLKRKCNIDNLKEIMIMQYGLSLSDHYWIDRNPFNYKWKDINLFENRYSEEIGNILFDKNIKIVVNMENTINPDTTTGGTLK

SEQ ID NO: 106868 - protein, 255 aa, Unknown
  Obtained from environmental sample
  misc_feature (1)..(255): Xaa is any amino acid
MATQICAACERENRDIAKYCRFCGKMIPATFAAPSDTLKTEPAVTTAATSAPASTSSASIPLATTQSAIAVVSASSPAIAIPSDYVGHEKIRAELEKIKSNIKFQKRRQSAGVGGAISSKIFVFRGKTGAGKTLVAKHFIEELRREGCLSSEIITSKEARELSKAYSDEYAIARFLSETKPAALVVDNATENEKLAYIHELILAASKSTQECICIIIGNSEGFDEFFGKNTEDRQRVTQDFNFQDLSLDDLTLIL

SEQ ID NO: 106869 - protein, 96 aa, Unknown
  Obtained from environmental sample
  misc_feature (1)..(96): Xaa is any amino acid
ALAPLKPKDINVIAVHPIFSPPASERLTSLSRDGLLNHIIVADTVSCSDSFIKSIPNLEVVHSADLSAKIIKSIVNHESMSKLLRTFNAGIYLSSK

SEQ ID NO: 106870 - protein, 146 aa, Unknown
  Obtained from environmental sample
  misc_feature (1)..(146): Xaa is any amino acid
TSYRDEAAKININRILESNASEDLKNKARLLISYMEVPGFDNFKKADNPSFSDVKNEPVIYRDVYVIWKGMATNLEVTDEAVRFDFLVGYDTRKTLEGIVPVVFKTPVTVNTERPLEVLGKIRLYGEKMDIALEGASIHQSGKLEN

SEQ ID NO: 106871 - protein, 158 aa, Unknown
  Obtained from environmental sample
  DOMAIN (1)...(157): Bacitracin resistance protein BacA
  misc_feature (1)..(158): Xaa is any amino acid
MGTLAAVIAVLWKDIWAVVRKLNQPLTAYLIIATIPTVIAALVFRNQLERAFETGRFLGFAFLITSALLIAAELLARRGAVKGGIEKMNWLDALVIGVMQAIAIIPGVSRSGATLSGALSRRLERDFAARFSFLLSIPAILGAVVFQIKDLVKDGGAK

SEQ ID NO: 106872 - protein, 283 aa, Unknown
  Obtained from environmental sample
  misc_feature (1)..(283): Xaa is any amino acid
QVKAFFDEKIKASQETLKTEQLSIQEKLKAIHEKYNAEITELGTKQKNYHLEWTKNAEELDALAKKHKEDINAALAKQQEEMNAAITKERESIISSLSQQQTDWKNNIIEFKKMAEKQHKELEASKNELAQSLTDLKAKSLASIKQQQDDLSSVLSDIKQKSDAAAKQQNEKLISAISDIKQKTDSAINQQHEELKSAISDIKQETNSAVKQQREDLTSALSGIKQETNSAVKQQREDLISALSGIKQETNSAVKQQLDELTSAISGIKQETDTAVKQQHAEL

SEQ ID NO: 106873 - protein, 146 aa, Unknown
  Obtained from environmental sample
  misc_feature (1)..(146): Xaa is any amino acid
GITPFSNTDILLKDVIIPNSVTRIGNSAFYGTALRSVTIPNSVISIGDSAFADCFALKSVIIGNSVTTIEAWAFSGNGGLTSVIIPASVTSIGYNAFSHNPNLTQVTFQRADTTIDNAFGGSSLETVYKAGGAGTYTLSGETWTKR

SEQ ID NO: 106874 - protein, 130 aa, Unknown
  Obtained from environmental sample
  misc_feature (1)..(130): Xaa is any amino acid
VAKTCLCMTAKTLGRNLEILEKYRKYADMAELRVDYLDPDERLLIRRFPELAGMPVILTIRRDTDGGLFVGGEGARISLMARGLAYAEADRRRNFAYLDIEEDLNVSSLEEAARTFGTRIIRSYHNIKGT

SEQ ID NO: 106875 - protein, 97 aa, Unknown
  Obtained from environmental sample
  misc_feature (1)..(97): Xaa is any amino acid
MDNTAEAHNTAEAQIAEAAVAAEEEAAAVEAAARAEAAAEESATAAAVQAEEEEADLCGTLRPAWTAMQDYPIPRWKASVQAQAPEAEAADQEALYS

SEQ ID NO: 106876 - protein, 184 aa, Unknown
  Obtained from environmental sample
  DOMAIN (37)...(179): Calcineurin-like phosphoesterase
  misc_feature (1)..(184): Xaa is any amino acid
VDIGGLFVSNDLSERLKEKNNPDSLSRLSPLTLEDEYSFIVITDTHIEDGNAHGLENIKTVIENNPEIKFAVFCGDLTQNGKEQDLNKFLEIADSLDIPAYPVIGNHDIYFGNWPVWKRLIGSTSYRVNGDSATLFILDSANSFLGKEQLDWLENELKSAQGRVFVFSHHNLFVDSPVSIQHMS

SEQ ID NO: 106877 - protein, 270 aa, Unknown
  Obtained from environmental sample
  DOMAIN (162)...(195): Tetratricopeptide repeat
  misc_feature (1)..(270): Xaa is any amino acid
KLADAYKGRGWLYFNKDKNDLAIADLTKVIQLKPKDDDAYYTRGYIYHKIGYDKSDWGRKIDSSITADYDRAMADYNSAIKINPNVASYYSIRGNLYQLKNDYDRALAEYTQAIRIDPNDFDLYEFRAELYERKGDKDRAIAEYNQIVRISTNLIQNNPNISSVYYDRAKAYKKIGDIDRAIADYTSIIRMDPNYSSIKFVYYNRGNLYVEQSDFDRAITDFNTVINLDPNYALGYCNRGDAYAKKGDLDRAIADYTSAIRIAPHSASGY

SEQ ID NO: 106878 - protein, 91 aa, Unknown
  Obtained from environmental sample
  misc_feature (1)..(91): Xaa is any amino acid
NAWGVFGAAFGPAILLSLFWKRFTFAGAVAGIIAGAVADVIYLIAFSSTGLYEIIPGFIAGLITAIVVTLCGKNPSTEVEALYDKSVAIDD

SEQ ID NO: 106879 - protein, 68 aa, Unknown
  Obtained from environmental sample
  misc_feature (1)..(68): Xaa is any amino acid
MGEIHYSRLPVDEWRNALLKMKAGGINIAASYSFWIHHEEIKDEWNFSGSRNLRLFTETVKDCDLYMF

SEQ ID NO: 106880 - protein, 249 aa, Unknown
  Obtained from environmental sample
  DOMAIN (116)...(249): Phosphoribulokinase / Uridine kinase family
  misc_feature (1)..(249): Xaa is any amino acid
ECKDYMDIYVQPLLPQTGLLNAFELMPYQDGFLLRFPGTGKGDTIEPFKDEPYLFNVYSDYKKWGKIIGVRVVGELNARIANRNFQEYIRIAETHQERRMGDIARLIYERRENIKMILIAGPSSSGKTTSAKRLEIELMVSGLKPIAISLDDYYKGTADTPRDENGEPDYECLEALDVEYLNKQLQALYRGEEISLPVYDFRTGTRKETGGRKIKLESNNVLIVEGIHGLNDALTYSIDRKTKFKVYIS

SEQ ID NO: 106881 - protein, 45 aa, Unknown
  Obtained from environmental sample
  DOMAIN (1)...(45): Ribosomal L27 protein
  misc_feature (1)..(45): Xaa is any amino acid
IRQRGTAIHPGTNVGMGKDHTIFAKTEGVVKFKKGAQNKTTVSVE

SEQ ID NO: 106882 - protein, 229 aa, Unknown
  Obtained from environmental sample
  misc_feature (1)..(229): Xaa is any amino acid
MFDTLTAIDNVTLIPDIWTGVWGNPKYMSTEGTIQMYPKAAGYEKIANTILNKISSSLPPGTGKGISLQMDDEPLYDWEFTDTTPITVTVTNTGANATGELSIYADGNNPTSFIISPTSIQDILQGGSTTFTVKPKDDLPPNSYEATVTVSGENGITASFDVSYSIVVSVEDTAIDGLWYNESMMLTTDANGTPGVWFFKYPNFWRLNGWRYAWKGTFTVTGHVVGADS

SEQ ID NO: 106883 - protein, 202 aa, Unknown
  Obtained from environmental sample
  misc_feature (1)..(202): Xaa is any amino acid
MDDEGWGERGTFTCTEARFTCVITEVYDGGSWGSPKPNATLIWPRPYRFENGNLIINDNVYVPKATQSGNEPYPHTGGNAPYRILAIGNSYSQDSMRYMRDILIANGADTNDIVIVNAYVGGQSLAGHAANAKSDSPAYERQSFGRRGEITSQYGVILKDIIKSGDWDYITLQQASVSSGKPETYNDDLTYLIGYIKDKCHQ

SEQ ID NO: 106884 - protein, 277 aa, Unknown
  Obtained from environmental sample
  DOMAIN (1)...(277): Glycosyl hydrolase family 52
  misc_feature (1)..(277): Xaa is any amino acid
IELSGPAAQNVYIGVESADRPGRCSALPFYNDVIDHNVETEPTALDVWGESDKRSGDQPNQQDRIGIDNPPVKIVKFADEEIFRLTTPSRDVWRCGDLEFKIYTPFQSIPDMTLETEFMSIDPTITKDVLIPAVFAELTIDNSSGASPRRAFFGYEGNDPYNAMRRIDGWEKSGVDAAKTGGTDNMNIKGVAQGAITGIFTDDADAVCALAFSPEELLAGDIADRLSFGLGTTGLIVMAAKPYELRTWRFAVCFYRAGVATTGIEAVYMYTRHFKNI

SEQ ID NO: 106885 - protein, 263 aa, Unknown
  Obtained from environmental sample
  misc_feature (1)..(263): Xaa is any amino acid
EYLTIGGEINWRTPINKEGESFSSNDPLWVTPSVMFRSPYYAKGLVGVNFTIGMDIRLSSAKPAYEYRFAKDGEDYVLNESKHLVGNYILNGETKDKVKVGEVYPLEPWRLFADLVFSFDLLASKRAEMARQARANAAERARLKKLAALSSAQRDSIAAKAREDSLAQAAALAAKADKARQDSIAQAAEAAEREARLKAEAEGREAQLIADAEGRESQLRADAERKRVADSIALADANKRLAEERARRSAAEQQMLSTGMLVL

SEQ ID NO: 106886 - protein, 265 aa, Unknown
  Obtained from environmental sample
  DOMAIN (2)...(265): Protein of unknown function (DUF1343)
  misc_feature (1)..(265): Xaa is any amino acid
GRPGLLQALGFEACEFISLYGSQESSLSADPKKLIDLDALVIELQDVGVRYYTFLSTLRNLFNTLKKENIPLPVWVVDRENPAGSWVEGSPLKPGYGSFIGIEGLPHRYGLTIGEMAYYFHAEIEADFPLHIVSWQAEVCGFPWTIPPSPNIPGFFTPGFYSGQCLWEGTNVSEGRGTTRPFEVFGAPWMEESLVTYNRKHGYENWNDPKHPLFDPNASLRWHRFIPTFHKYKDECCFGFQLILRDPKASYHALFHALRIIRFIR

SEQ ID NO: 106887 - protein, 73 aa, Unknown
  Obtained from environmental sample
  misc_feature (1)..(73): Xaa is any amino acid
MGAVYLAYLETRMGDPLLALLAYNGGMNRVRRWRNSMPVRFPPDLFLETVEYAETMEYGRAVMGAAAIYDTLY

SEQ ID NO: 106888 - protein, 198 aa, Unknown
  Obtained from environmental sample
  misc_feature (1)..(198): Xaa is any amino acid
MEIAKGVVATGQQIGAGWTPALSVVKALAANIEAKRRGLRPVYWLADEDHDRMEVSSVVAFDGDRLIRHRFNFASPQGTATGWLEWTDAHQQEAQELWGQLPAPTEPNLRGHVLALGDALWRRGIAPYSPTVDADRAAIQGELERWRSLDLENELCIQADALESKGEKVILDPRRQSAWFSLDPVTGQRRPLERGQVC

SEQ ID NO: 106889 - protein, 183 aa, Unknown
  Obtained from environmental sample
  misc_feature (1)..(183): Xaa is any amino acid
MANATIGLDSMYYAKITEDASGNETYAAPKRLGKAIQADLTVNLNEATLYADDAASEIVKEFSSGVLTLGIDGIGYEVAEDLTGASIDSNGVLVSRAEDTATPVAVGFRARKSDGTYRYYWLYRVKFGVPASNNQTKGDGITFQTRTIEWTIQRRNKPDSDGKHPWKVEAKEGDASLSATVIS

SEQ ID NO: 106890 - protein, 238 aa, Unknown
  Obtained from environmental sample
  DOMAIN (2)...(193): Calcineurin-like phosphoesterase
  misc_feature (1)..(238): Xaa is any amino acid
SGGLAEVAAYVKAVKDLNKYVILLDAGDINTGSALSNMFNAEPDILAYNMMGYDAAVFGNHEFDSDQEKLDKQIQLAGFPFVSSNIKTKTGEFLGGNQYIVKTYGNIKVGIFGITTLRTLTIASPNKSLVFINEIDAAREVVGILRDIEKVDIVIGLTHMGDVKEMPDHITSVELAGAVPGIDIIIDGHSHSFLTGPLKTGNTWIVSANEWGKYVGHGKLTVVNGKLAELLWEPVYIG

SEQ ID NO: 106891 - protein, 234 aa, Unknown
  Obtained from environmental sample
  DOMAIN (98)...(234): Melibiase
  misc_feature (1)..(234): Xaa is any amino acid
MVTFDGGWIKETHRHDRKVQYGISVNSSTTGGSSNRHNPGFLLAEKDATEEHGWVYGVNLVYSGNHLGVVELSNHDLTRVGIGVNDHCFSWALEPGEHFETPEAVFTMSPNGFNGASQHFHDFVNNHIVRGEWKNRIRPVLYNNWEGTFFKFNQAKLLELADDAAELGVELFVLDDGWFGARNSDNAGLGDYDVNRKKLPAGLDGLAKAVHKRGMRFGLWFEPEMVNEDSNLYR

SEQ ID NO: 106892 - protein, 267 aa, Unknown
  Obtained from environmental sample
  DOMAIN (77)...(265): MutS domain V
  misc_feature (1)..(267): Xaa is any amino acid
GRQGIAGGERYTTDRLASLESDINGASDKLIELEKKLFLEIREQTKKVLQHLAAAAHRIAEFDAAQSLAKAASIRNWTRPVLNESTNMEIREGRHPVVEAHLGRGEYIPNDIILHTDNKDGISFVMITGPNMAGKSTYLRSAALITVMAQAGSFVPANEANIGLCDRIYCRVGASDNLARGESTFLVEMNETAFILNTATEKSLVIMDEVGRGTGTNDGLSIAWAVSEELLNRIKCRTLFATHFHELSLLSHPNLANRSMEVLDNDG

SEQ ID NO: 106893 - protein, 119 aa, Unknown
  Obtained from environmental sample
  misc_feature (1)..(119): Xaa is any amino acid
EIDRRTKEVTELRARYSEAVLKGDQTEANRLEGQVYRMNEALKDYYQTQTAILEDQRKKLMLSGSFLDQVYDEIRYIAESEGYSMVMNLGDSKGIIWYSATVDITERLIHNLRTKSGRN

SEQ ID NO: 106894 - protein, 124 aa, Unknown
  Obtained from environmental sample
  DOMAIN (7)...(113): MutS domain I
  misc_feature (1)..(124): Xaa is any amino acid
MDGLRSSPMLDQYRRIKKEHTGSILFFRLGDFYEMFADDAVEVSSLLNLTLTSRNGFPMCGVPYHAARSYIARLLKVGKKIAICEQFTAQEKQKLIDRDVVEVITPGTTIDEDFLDKGSSNYLC

SEQ ID NO: 106895 - protein, 284 aa, Unknown
  Obtained from environmental sample
  misc_feature (1)..(284): Xaa is any amino acid
GAGEFELQRLNYRNQELLAEKSLISEYELKTSKTTLDNQAADLAVAESNLKVIETEINQYAYITSPIDGIVLDRRINIGDTVVDSSSNNSSAIFTLAENLREMQIEAAVGELDVASIQKGQRARFTLESMPGRSFQGEVETLRMVPIVSNNVVSYTVIVKVENLDGSLLPGMTCAVDFIVERGENVLMVANAALRYQPTSLSDEKIADMVFNAGLANLDDEQRQAAIEARAQAKAQQAHGQNPNNGFQNLMMGGQGLRMPGGRGGRGQGPQGEQQGGGREQVII

SEQ ID NO: 106896 - protein, 291 aa, Unknown
  Obtained from environmental sample
  DOMAIN (124)...(291): Predicted permease
  misc_feature (1)..(291): Xaa is any amino acid
ASFAAAVSGRVYTKLNAIGPEGNAEVDVVGVEPDYSKARNWKVSAGVFIDEDDLLQRSRVAVLGSDTAKNLFKEPENALSGQIRLANIYFTVIGILESKGGDSDDGIMVPMDTAMTRLLNSRNIDTIYMSVVSKEYMEAAQKEAELILRESRNIREGSDDDFTVMNQKDMIEMASATSKTLTTLLASIAGVSLLVGGIGIMNIMLVSVTERTREIGIRMAVGGRKRDILFQFLAESVILSLMGGILGIGTAFLACRVLQAAGIPTAINPLIVAGSALFAAMVGVIFGYYPA

SEQ ID NO: 106897 - protein, 277 aa, Unknown
  Obtained from environmental sample
  DOMAIN (153)...(277): Pyruvate flavodoxin/ferredoxin oxidoreductase, thiamine diP-binding domain
  misc_feature (1)..(277): Xaa is any amino acid
VFALSRAALVVLGGADSANGVDRINDAISRGADISAADGERGDSDGTRSFKLDFGLCPHIQTYPQLKSSFVSGVLAAILGIPCDLALGLITEKLKSKNLTEQNKESFKLGFESATSGILPSLRAANGHALRLASPRQSSEDRVILDGNKAVALGAISAGCRIYASYPISPATPIGAFMATYLPALGGFAYQAEDEISAIGAVAGAWFFDTPAMTATSGPGLSLMQEFLGYCSMTDTPAVVVDVQRAGPSTGMPTKHSQDDLMAVIFGGHGEGQRIVL

SEQ ID NO: 106898 - protein, 111 aa, Unknown
  Obtained from environmental sample
  DOMAIN (4)...(111): Peptide methionine sulfoxide reductase
  misc_feature (1)..(111): Xaa is any amino acid
MPMKTIYLAGGCFWGVEKYLSLIQGVVSTSVGFANGRTENPSYEEVCKNDTGHAETVKCEFDPSKISLGFLLELFYDAIDPTSLNRQGGDAGTQYRTGIYYTDEAERKVIL

SEQ ID NO: 106899 - protein, 135 aa, Unknown
  Obtained from environmental sample
  misc_feature (1)..(135): Xaa is any amino acid
MFLLGKIFTWLILSPGLFLVLLFLVLHAALYNRRRTCVFLLIIACSVIYFLSVKPGRDLLIQPLETKYPLSQNPRIDSLIVLGGGTRQSAAGDSSLQRLYAAYQIYQKKPVPIIVCGGDPLDEGVRESAVLAAVL

SEQ ID NO: 106900 - protein, 104 aa, Unknown
  Obtained from environmental sample
  DOMAIN (9)...(89): YbbR-like protein
  misc_feature (1)..(104): Xaa is any amino acid
MSTLETRSFSIPLKLETNSQFIQSGSFTDTVRVSLRGNADSIHSIPEKDIEAYIDLSKYKNEGEYRIPVQIRKKGGALEIEPLEIKVIPAEISVNLEQKMCVTF

SEQ ID NO: 106901 - protein, 209 aa, Unknown
  Obtained from environmental sample
  misc_feature (1)..(209): Xaa is any amino acid
MQQVIPVNPDLLRWARVEAGFSLPDAASRAKITAPRKGKNRPEQTAVDRLAAWENGSNAPSLHQLEQLAKVYRRPLITFFLPKPPEKMAAIPDFRTLGGSAASADSPEFSALRRRIAVLQQELRDLSKDAGSEKLSFIASISDDTPVSDFVADIRRTLGVKVEDQMRAKDGNDLFRLLRSAAQRAGIYVLVVGDLRSHRSSIAVDEFRG

SEQ ID NO: 106902 - protein, 289 aa, Unknown
  Obtained from environmental sample
  misc_feature (1)..(289): Xaa is any amino acid
ADLQTLRQELAGADDELRQSMRETIDKVNGDFARFGNEMRDSWEGEANKLRDSWEGEAGEYAANLQTLRQELAGADDELRKSMQETIDKVNGDFARFGNEMRDSWENDAGKYKADLQALRQDIAGIDDELHKSMQETVGKVNGDFARFGNEMRDSWEAEANKLRDSWESASNGLRDSWEREAGKYKTDLQALRQDIAGIDDELRRSMQETVDKVNGDFAAFGNEMRGSWEGASGEYIANIQTLHQKLAVLDDELCKSMQETINKVNGDFARFRNEMRDSWEGASNKLRD

SEQ ID NO: 106903 - protein, 174 aa, Unknown
  Obtained from environmental sample
  DOMAIN (1)...(173): Bacterial extracellular solute-binding proteins, family 3
  misc_feature (1)..(174): Xaa is any amino acid
AAVAALESGQADGVIAGMSITEERKLKYDFSAPYYDSGVVMAVRAADNTINGYADLRGKRVAVKTGTEGATFAESIKDTYGFNLVYFDESPFMYEEVKSGNSVACFEDYPVMGYGISQGNGLKMVGGMEKGSSYGFAVLKGKNQELLKKFDTGLANIKANGTYQAIIDKYIKTN

SEQ ID NO: 106904 - protein, 111 aa, Unknown
  Obtained from environmental sample
  misc_feature (1)..(111): Xaa is any amino acid
MREVSPLLMRGVGMTVQTTVSALIIAVILGLVACLAGMSEFIIPRLIAKTYIWIIRGTPLLVQTFFVYFGVPQLIQSLGFNFRLSPFIAGVITLSLNAGAYIAEIFRGGIE

SEQ ID NO: 106905 - protein, 183 aa, Unknown
  Obtained from environmental sample
  misc_feature (1)..(183): Xaa is any amino acid
MIGANRDKRPLPIGESDFACVIEDGYYYVDKTLLIRDLLDTRAKVTLYTRPRRFGKTLNQTMLQCFFEDTSRIGGKDTRSLFRGLKIEGAGERYMDHQGKYPVISLSFKESKVNSFEGSYSWLREYIAKEFKRHAYVAEKISDDYDRNMFSKLSDRAGSIEEYSKSLRFLSECVENYHGKKAV

SEQ ID NO: 106906 - protein, 210 aa, Unknown
  Obtained from environmental sample
  misc_feature (1)..(210): Xaa is any amino acid
MAPLGDYGSLMADEFQRVVERKGGTILVTQNYAEGLPDYQNEFKLLRDRKLKLDTRRMNMSKGSSNVSFLPKRESWLEDSTMLFPAIFIPSSNPADAGLMTAQVAFNKVRVGNLLGSSGWYGREFLANAKKQAEGSVFSIAFFSDGNEQKSFTEKFKNKWQRDPDENKVAGLSYDAIRIVNKALQSLAQSETPQSLAAEILQKKEYNGVY

SEQ ID NO: 106907 - protein, 281 aa, Unknown
  Obtained from environmental sample
  misc_feature (1)..(281): Xaa is any amino acid
VKIDEVSKEWQSVDAITAHISGIESQLREFDMKILSLAKQERVIASFEAKLEEIKALINDISANEENLQKRRVDIEGTNNKIREYFDSLGKLEKSVEGIGRYEELIMGIGRKIDGLEALSGRIEGRIKATEDRAGIIDEVQRKIDGLGSMVSEVDERINAQLQRKAMVEKTEKRLDQLNYLLGDINMKIQSLMKDQSKVDAVITQLSAISVQSMEAKNMVARLTEEKAALSQEENHIRDVRIKLQSLVSDAEKDVSRFKSNISDVDAAMAQNREKFTKIIE

SEQ ID NO: 106908 - protein, 278 aa, Unknown
  Obtained from environmental sample
  misc_feature (1)..(278): Xaa is any amino acid
FEIGGQDAKYVLLKNGVPIDYAMNEACSAGTGSFLEESASGDLSIHSAKDIGPIALDANAPCKFGEHCSAFINSDIRKAVQQGAGRENITAGIVCSIVANYLNRVVGNRTIGGKIFLQGGVAKNPAVPLAFAMFLNKEILVPPSPELMGCFGVALLAKRKRADGLLEEQSVVIDDIINREIGYERVFNCQSCENLCPIQVLNVNNHKYMFGGRCNKYTNMRKHVKDVPVFDYIEKRQKMLFEEFAAPVLDASSVQTQKRTFTVGIPRAFSAHTLYPLY

SEQ ID NO: 106909 - protein, 259 aa, Unknown
  Obtained from environmental sample
  DOMAIN (1)...(90): Dinitrogenase iron-molybdenum cofactor
  misc_feature (1)..(259): Xaa is any amino acid
RHFGNTPCFVIAEVHGAKWTLIEKRDNAPACGGKGHSEEKFNTSAQLLSDCSAVVCSRIGSFAQNGLRAKNIQPVEKHGFIEDILNDYARVLAQNNHPCFNHAAHGQYGRIHLPVSARCNIKCRFCERNINSNEMCPGVCSQILTPEQAVKTLAEALELCPELTVAGIAGPGDALADNSAVETFRLVDKQFPRLLKCLSTNGLGLPDKVRELSALGLNHVTVTVNAVDPKIGERIISHIILNGETIEGEKAAQILLSRQ

SEQ ID NO: 106910 - protein, 81 aa, Unknown
  Obtained from environmental sample
  misc_feature (1)..(81): Xaa is any amino acid
SYIDTVERTLNNTIRSGISLEGDRYFYVNPLEVWTEACIENSSRSHVKPIRQKWFDCSMLSYKCGSYPDQPWRVHLFYKWG

SEQ ID NO: 106911 - protein, 157 aa, Unknown
  Obtained from environmental sample
  misc_feature (1)..(157): Xaa is any amino acid
MQKSVVTNREAIRQIIGLCQSKTTCAVDIRYDEPMSSHTTFKVGGPADCYVRPEGDDFPAFCAALLDHARTAGMSVFILGGGANIVVSDRGIRGIVLDTGAWKGQAGPARQGLSFRSGTTMDEAAETAAAAGLSGLEFLAGMPGSIGGAVRMNARCY

SEQ ID NO: 106912 - protein, 48 aa, Unknown
  Obtained from environmental sample
  misc_feature (1)..(48): Xaa is any amino acid
MPTLHWLTRDDDLKAAGKAEYRLLTEDEKYSYGDTDSDNMIIQGDNLR

SEQ ID NO: 106913 - protein, 137 aa, Unknown
  Obtained from environmental sample
  misc_feature (1)..(137): Xaa is any amino acid
MLTTNHTNQHEQKQELIYKDECYKIYSCIYAVNKKLGTGFLEAVYQEALEIELKRENVPFKSQHELEILYDGIPLTKKYIADVVCYDKIIIELKAVSKITDQHRAQLINYLAVTGFKLGLLVNFNSFPKAEIVRIVR

SEQ ID NO: 106914 - protein, 91 aa, Unknown
  Obtained from environmental sample
  misc_feature (1)..(91): Xaa is any amino acid
TLGNAMYMAQSALTQWLGYLVDKKQEVPGASPIEEVKPSDGEFVNLIRAELRDARAVKRTVSIPKWMDDKVIQSGLSLSRVLQDALRERLG

SEQ ID NO: 106915 - protein, 76 aa, Unknown
  Obtained from environmental sample
  DOMAIN (6)...(74): ATP synthase subunit C
  misc_feature (1)..(76): Xaa is any amino acid
MDLTVLIAIGAGIAVVTGLGAGIGIGIATSGFLQAISRQPEATGKMTPMFFVGVALAESTAIYGLGISILLITRLG

SEQ ID NO: 106916 - protein, 247 aa, Unknown
  Obtained from environmental sample
  DOMAIN (10)...(169): Glycosyl transferase family 2
  misc_feature (1)..(247): Xaa is any amino acid
NINTKNPAISVIIPAYNTGKYIAECLDSVLAQTFQDYEVICIDDGSTDKSLAIFKEYAERDPHIKVISQKNQGVVAARNNAIAAAHGEYILTLDSDDIIMPNCLEVLFNFITTHEYAVVAPGVVNFGDLEKKKTYWSNWPKPTKWNMYSLNIGIPNTALYSKKLWEKYGGFGHLFDKGAEDLDFWLNFLDDDQKIVWLPNRLFYYRQKSIEESRNRQSRRTYGFKKVREEIHANLRRKHPKVAIYRI

SEQ ID NO: 106917 - protein, 265 aa, Unknown
  Obtained from environmental sample
  misc_feature (1)..(265): Xaa is any amino acid
MTNPGDIAEVTYTFVFADGIPSTKKSVPTKKSLERAAKIKADAEKAELTRAKNTDNAELEAARARERAAQERARAAQAREREARAREREEQARREEAARINRDTLNGALLAAEEIKKWRNTDFDLPKSKYPTPDNASGQLSETGSANGNLVMSADYMRDMTGKLADDYKLYLKLRGDHANSPTFYFDMANWFYANNDKETALRILTSIADLELENASLYRLLGYRLKEYGEYALEKFVCKKVVQWRPMEPQSHRDYALALADNGE

SEQ ID NO: 106918 - protein, 83 aa, Unknown
  Obtained from environmental sample
  misc_feature (1)..(83): Xaa is any amino acid
LEMKLFNKIVICGGTHGNELTGVYLAKKHGWLLANQAAVAASRRYIDKDLNRCFALSNLNSNDNALESTRAREINALLGKKGR

SEQ ID NO: 106919 - protein, 252 aa, Unknown
  Obtained from environmental sample
  DOMAIN (3)...(251): Lipid-A-disaccharide synthetase
  misc_feature (1)..(252): Xaa is any amino acid
VLPFAEFNRMGYAEVLPHLPFFLGAKRRLLKMMAGARRPDVLVCVDYSGFNIPMMKEARSMGIPAVWYIAPMVWAWKRRRAATLGALASHIAVIFPFEERYFSPYAAPVTFVGNPLTESLPEIGADALKFPGADGFRVAIAPGSRPQEIRNMLDVMIDAACMLKTQFPAIKISVSRFGNFKENLFDRAKDAGFEIFGGPLSALLQRSDLALVTSGTATLEAALLGVPMVAAYRTSRVSYAIYKKFVTIDNIS

SEQ ID NO: 106920 - protein, 240 aa, Unknown
  Obtained from environmental sample
  misc_feature (1)..(240): Xaa is any amino acid
REDVEKLKTESSFAIAISGVVQSNNADVIGGEKSVQVRIQGVEPDFLTARNWNVNEGYFFDEEDLSLRSTVAVMGRTTAKSLFGDAENALSRQIQINTVYFTVIGLLENKGADFEGRDQDEIIIVPMDTAIARLNNSPYINMIIMSVFNKDYMDAAQKETEMLLRESRNIPDGITPDFAIMNQSSMISMASETSRILTGLLTAIAGISLLVGGIGIMNIMLVSVTERTREIGIRMAVGAR

SEQ ID NO: 106921 - protein, 275 aa, Unknown
  Obtained from environmental sample
  DOMAIN (172)...(275): HD domain
  misc_feature (1)..(275): Xaa is any amino acid
ADAGSIYVTVPAEEDEKGIEKIAIKHSQNDTIQKATPPGQKMIYSIFSLPINEKSISGYCALNRTMINIPDMYNIPPDAPYSFNATFDAMTGYKTTSSLTIPLVSDNRLIGVIQLLNAKDKNGNTVSFSPDDEILLNHFANNTSMVLQRAYITRTMILRMIKMSELRDPKETGTHVNRVAGYSTEIYDRWAFHKKIPVVEREKYRDLLRISAMLHDVGKVAISDTILKKPGRFTPDEYKIMQKHTIYGACLFNDPSSPLDTLSKEIALTHHENWD

SEQ ID NO: 106922 - protein, 279 aa, Unknown
  Obtained from environmental sample
  DOMAIN (1)...(279): Phosphomannose isomerase type I
  misc_feature (1)..(279): Xaa is any amino acid
YEWGSPNLLPQFLGIENDNGIPYAEMWMGTHSGAPSKICMSDDKTEDLLNIAGDIPFLLKVIAVKEPLSIQAHPNKEQAVQGFKREEEVKIPLKSPSRNYKDPNHKPELLCALSPFTLMAGFRKPDEIYKLLEEFVKMIPQLKEVFNPMFRALKTDMLGVFFRILFYYSKLELEYITKLVNECIINETGGISLQQWQLIKKLAVIYPNEIAILSPLYLNYFTIQPGQAVFIPAGILHSYISGFGVELMANSDNVLRCGLTPKYVDIPELMSILKFVSFM

SEQ ID NO: 106923 - protein, 293 aa, Unknown
  Obtained from environmental sample
  misc_feature (1)..(293): Xaa is any amino acid
IAEKKKCDFAGLADFGKFAGGLAPVCFTGDGCAFRMTGGSMTIWMTVTVINTILADSIKTICERIKKEFGKSKGGKQTADADNGSNQQADADSRKQELSAAVLNVLSAVIKESKSVLFDGGSSERAKEAQARGLQNMASAPEALKTLIAPKTVELFGRHKVFSEAELKALYNDRLEQYDKTLDVEVKTLTDIVNTQILPAAYNYQTDIASGLEVLRVLADDMTIEMTEGALEDRKDMFEKLTADIYYVRKNLKELAVMADKARGMEIGERVAYLSKEIKPQMELVRRYADAWR

SEQ ID NO: 106924 - protein, 236 aa, Unknown
  Obtained from environmental sample
  DOMAIN (171)...(236): Bacterial flagellin C-terminus
  misc_feature (1)..(236): Xaa is any amino acid
VDSDIGRIGKANQNTTDGASLLQIADGTCSEIQGILQRVRELSVQSANDTLSSTERHYLDQEATELLKEMDRIAMSSMFNFKQIFGNYKNDSFSGEERNLKDWKPFSLGKDANGNEARAGVLHIGYSAGKMDEVKISIPEISAKTLGLDTSIHTYVLGTDIHTYAFSLATQRGATRAIDDVDFALSSVLTVRTYMGSIISRLDIHADDLQDKDISLNDYSGKIMDADVAKESTEMA

SEQ ID NO: 106925 - protein, 130 aa, Unknown
  Obtained from environmental sample
  DOMAIN (6)...(128): Cobalamin adenosyltransferase
  misc_feature (1)..(130): Xaa is any amino acid
MRLTKIYTRTGDKGSTSLIGGERVPKSHLRLECYGTIDELNAFIGKLKSLCKTNPATSENLNNIQKMLLNIGAVLATPEGKKWKGMPSINKEHIKELETEIDKMNSKLKPLKEFTIPGENEINAEAHICR

SEQ ID NO: 106926 - protein, 113 aa, Unknown
  Obtained from environmental sample
  misc_feature (1)..(113): Xaa is any amino acid
MNEIISRYLPRIDFDSYEDFYENYRCNVPDNFNFAYDVADEWAKLQPEKLALLWTDDTQEMKSFTFAEIKRLSDKAANALLSLGIKKGDVVMLILKQRPGVWVLMCALSKIGA

SEQ ID NO: 106927 - protein, 151 aa, Unknown
  Obtained from environmental sample
  misc_feature (1)..(151): Xaa is any amino acid
AYFLNLAARSVTIVKPVPPDSVFPLTKEKAGRVLLAGRFPEFVTYGRTAFPNAVTYRFSNSAEPDDILYYARNADTVIFCLSDSFDLRLLRNLQQLNKNVIVFSILSPAYLESVQWVTGAVAVYSYSPESFAAGFSAITGRIPAQGILPYE

SEQ ID NO: 106928 - protein, 94 aa, Unknown
  Obtained from environmental sample
  misc_feature (1)..(94): Xaa is any amino acid
AVVFALTALAGVNPVHHIFAGGLFLGAIFMATDYVTTPQTNSGRVIFGVGCGILTVLIRLFGSYPEGVSYSILIMNTLVPFINKITYKKALGGL

SEQ ID NO: 106929 - protein, 272 aa, Unknown
  Obtained from environmental sample
  misc_feature (1)..(272): Xaa is any amino acid
NTITETAFIDTGVAPYVDYYYRVTVTAAGVEGVPSNSVFARAEMTVPGANLAAKLAWLKTNAVSGNFYCIEVSADENLAPSDLSYSGKTGIAVMLNGDGIVRTVSLSSSGSLFTVGSGVTLLLGSNVTFRGRSDNNNSLVYVNSGGALEMRMGSVISDNTCGGVYVDSGTFTMNGGKISGNTGGVYVDSGTFTMNGGEISGNTADGGDGGVNVDSGTFTMNGGKISGNTTVNGGGGVFVWGSEATFTMSGGEISGNTSGNISYYGGGGVAVY

SEQ ID NO: 106930 - protein, 69 aa, Unknown
  Obtained from environmental sample
  misc_feature (1)..(69): Xaa is any amino acid
MDKVYENFFRQIAGERLDAEIDIKQAIVGDEIRQQLTKRIEALENKAMREKQPRRKWELMEEVKRLNNY

SEQ ID NO: 106931 - protein, 193 aa, Unknown
  Obtained from environmental sample
  misc_feature (1)..(193): Xaa is any amino acid
MSNYIEKTIKKYHHPVGIDKTTKESVFDPLERYIRAWAFKNDYLLTDVQLSGSRAKGTAISLSSDMDIFISLSSTNTHALKNIYNSLYMYFNDLPFSCRKQNVSIGVTYSGKSVDLVPGKRQGQHGNDHSLYKSKQDTWTKTNIDEHIRFVKNSSRIPEIVATNIWRHRHNLTFPSILIELVTISALANKETK

SEQ ID NO: 106932 - protein, 229 aa, Unknown
  Obtained from environmental sample
  misc_feature (1)..(229): Xaa is any amino acid
MDKSDKLKMHTPSLADENFAKLAALFPNAVTETIDEDGKVVRAIDKDALAQEINAHVVDGREERYQFTWPDKKKSVLLANAPIAAALRPCREESVNFDDTENLYIEGDNLDVLKLLRETYLNRVKMIYIDPPYNTGNDFVYNDDFSEDAEEFLRRDGQYDDEDRLVLNRSTNGRFHTDWLNMMYPRVRISKDLLTDDGLIFISINDKELQNLKKMCAEIFGEKNEIATL

SEQ ID NO: 106933 - protein, 105 aa, Unknown
  Obtained from environmental sample
  misc_feature (1)..(105): Xaa is any amino acid
KEVLPGLLKAWVSKTGAESINLLLSEGDLAKLKSWAVGALAEEFKKGTELKSDRNLASGFRIANKDGSSYYDFSAESVAELLSSYLNPHLAEILKGAVQGTGAKG

SEQ ID NO: 106934 - protein, 91 aa, Unknown
  Obtained from environmental sample
  misc_feature (1)..(91): Xaa is any amino acid
IREFETGYPETHKSFWNEEMFSFHSLDWWRHLWEKTGIVDIISGYNISDPKDIWYPWAHWAKEHLKFDDVEFLNADTENQITLFVLSAVKK

SEQ ID NO: 106935 - protein, 122 aa, Unknown
  Obtained from environmental sample
  misc_feature (1)..(122): Xaa is any amino acid
MIEDQGWRITAFKIILIILIAVYSVKLFTMQILSGEVYLSRAQDISRRTFTIPAQRGEIYDRNYIKQLAMNKDSFAVNITPAEVPKGKMEEIIYAVSGIIGVPTDEITAKLPKQYCSLPACE

SEQ ID NO: 106936 - protein, 93 aa, Unknown
  Obtained from environmental sample
  misc_feature (1)..(93): Xaa is any amino acid
MSEKQLYGHPKSLCDVPTKYCGGCGHGVIHRIITEVIDELGMQEKSIITNPVGCSIWADLYFDFDSVQPPHGRTPAAATGVKRVLPDHLVICY

SEQ ID NO: 106937 - protein, 71 aa, Unknown
  Obtained from environmental sample
  misc_feature (1)..(71): Xaa is any amino acid
MIFPLEELIGYEKNMYEITAASSRRSYQLSMLYAAEDDQVRYWIDDNDGKVVSLAARQVFTKEIEFRMDNQ

SEQ ID NO: 106938 - protein, 61 aa, Unknown
  Obtained from environmental sample
  misc_feature (1)..(61): Xaa is any amino acid
MSADIFSGILLSLAPGALLANAVGVALGIIFGALPGLTATMGIALLIPLTFRMPPVEAFSA

SEQ ID NO: 106939 - protein, 268 aa, Unknown
  Obtained from environmental sample
  misc_feature (1)..(268): Xaa is any amino acid
VAFENLYYSSVDGVLFYTKDGVYSLVQFPAGKSGKSYTVPDGVTAIERWAFYGCTRLASIVIPNSVTSINGAFAGCGSLTSIEVAADNAVFRSVDGVLFYTGNKDEYILLTYPGSRRGAYAIPSGVTRLREKAFSDCAGLTSVAIPNSVMFIENHAFSGCTGLTSVTVPRSVLSIEEWVFSGCTGLKSIKVAPGNDAFRSVDGVLFRIGYDSDELLAFPAGKQGAYNIPDRVTSIESMTFFNCVGLTAVSIPDSVTYIGGWAFMECYG

SEQ ID NO: 106940 - protein, 90 aa, Unknown
  Obtained from environmental sample
  misc_feature (1)..(90): Xaa is any amino acid
MNVAAMETLSPKALPPLPPDGDWSRAFGHWPVMGPEAVAALALAPAGVYVDGTLGGGGHSRLILEALGPLGRLIALDRDPEPRHWAEAGW

SEQ ID NO: 106941 - protein, 249 aa, Unknown
  Obtained from environmental sample
  DOMAIN (1)...(102): Penicillin-binding Protein dimerisation domain
  misc_feature (1)..(249): Xaa is any amino acid
DPAGIFDKLNTNSKRFVWLKRRLSPAETEAVRALSIDGLEFCKEYRRAYPNGSLAANFLGFVGIDNQGLEGLELGLDDYLRADSQKIRIRRDGRNREMLDSGEIREARGASVVLTVDRRIQYVTEKALAQAVETYQAKSGLALVVRPKTGAVVAAAVWPTFDPNEYQKASKSARRNRILTDPFEPGSTFKVFVAAAALEENLVNPDTVINCENGAFKVGSNVVRDTRSYGDLSVSEIIKYSSNIGSLKI

SEQ ID NO: 106942 - protein, 273 aa, Unknown
  Obtained from environmental sample
  DOMAIN (1)...(268): Alpha amylase, catalytic domain
  misc_feature (1)..(273): Xaa is any amino acid
SIKLIMDLVINHTSNRHPWFINARQAIREGNPDDRYAKYYIRETEKTSGKTWYELEKTPDGIQYYYEGNFSNDMPELDLDNPELRREIADIAKFWLDKGVGGFRLDAVSYYYIKQDSRNIQFLKWFGDECRRIKDDVYTVAENWSTAASILNYYEAVNCFDFTMSGTTGTIYYAAQGMRSATEYAKGLASYQGLVLEKNQKAILNPFISNHDMDRAAGFLDVGGYKMHIAANLYLLSSGSPFIYYGEEIGMKGSRGPEQTDANRRLAMLWGDS

SEQ ID NO: 106943 - protein, 203 aa, Unknown
  Obtained from environmental sample
  misc_feature (1)..(203): Xaa is any amino acid
MGLDMKTRKKICSEIFKRYQKESKKNKGRILEEYAPLLGYNRDYLANQLTNWGKTYYAHVDGKTIKFTAKPTVQDRRRALRGKRTGRPEKYIPALVTVLRDIWELFDFQCGKLLAPLIRGMMNFLVLEFNLSEELQTLLKSASPATIDRKLRKIKERYRVKGIRTTKPGSLLKSQIPVRVCFDRDERKPGYFELDTVSHCGTR

SEQ ID NO: 106944 - protein, 142 aa, Unknown
  Obtained from environmental sample
  misc_feature (1)..(142): Xaa is any amino acid
AGFCKKQVTGDPSAAAYEDVKQIIKDFTDAMDDDFNTPSAISHVYAIVKLLNTETHSDAPDPGKIKTILDFFSSHVEPVLGFNFDAQTTGSNDQTQELVTYLSDIRQKLRDAKQFELADKIRTDLESVFNVNVKDGKIGNPR

SEQ ID NO: 106945 - protein, 86 aa, Unknown
  Obtained from environmental sample
  DOMAIN (22)...(86): OB-fold nucleic acid binding domain
  misc_feature (1)..(86): Xaa is any amino acid
MKTPGRIKIVELLKHAPTGADVTVKGWVRTKRGNKNITFIALNDGSTIHNIQVVADMNAFTEEQLKPVTTGACLRIAGKLVESQGS

SEQ ID NO: 106946 - protein, 246 aa, Unknown
  Obtained from environmental sample
  DOMAIN (68)...(137): HAMP domain
  misc_feature (1)..(246): Xaa is any amino acid
VDALNTWDKATDDMFAAGRETAATLKTVREYSARALKAGGDMSVDYDKRARALAQHLAAQSATSQSLMLGGSGVGIAIGILAALFIIMGLIKVLHGASSFAESLAEGDFHIQINNKEKGEIGDMIAAMRKVPAALQAIVNDYTALEKRVESGELDAKVDPAPYSGGFAGLVAGTNNIMARLLMIVDSIPSPILMLNKEMRITFLNAAGRKICTSNYKGASTLQVFKCDDDGTASDALLIAARTLQP

SEQ ID NO: 106947 - protein, 152 aa, Unknown
  Obtained from environmental sample
  DOMAIN (1)...(152): Glucuronate isomerase
  misc_feature (1)..(152): Xaa is any amino acid
MDEDFLLETKTAHKLYDAVKNEPIYDYHCHLSPEQIANNINMKDLTEAWLSGDHYKWRMMRAIGYDEKYITGNADNYDKFISWACTVENLIGNPLYHWTHLELQRYFNITEPLTKKSAPSIWKKANTLLQKPDLSVKKIFEKFKIYAVGTTD

SEQ ID NO: 106948 - protein, 95 aa, Unknown
  Obtained from environmental sample
  misc_feature (1)..(95): Xaa is any amino acid
MDFVAGGAARDALRAERQDQQGNAREGTVAALAKETGADFMLLGTVRTIIDKADNKSVRTYFVNAELTSIETNQRMWMGQNTEIKKVITRPKNKL

SEQ ID NO: 106949 - protein, 258 aa, Unknown
  Obtained from environmental sample
  misc_feature (1)..(258): Xaa is any amino acid
VDRWVPNIFDIDIAVPRETPIPYGFVITGFTARGDVSGKLNVSMESQTLDISGDLYMNNTTLGINSDEIAGSQKQGEGNANGHSVVDLMINTGPIVEFFYPDSKFPLLRANPDMGTKVHVTADTLTRQYSLTSDIKIRGGEIFYFERSFYIRSGLLVFRENELRFAPRLTARAEARDRNDDGPVTISLIVDNAPLFDFTARFESSPPLSQIEILALMGQNITGGAQVDENAGIYQKEMAFLNSTTDMFAQFYVVRLVE

SEQ ID NO: 106950 - protein, 183 aa, Unknown
  Obtained from environmental sample
  misc_feature (1)..(183): Xaa is any amino acid
KEIFGDPTKNHGYCRGLWQGREAAFWTSEAGVFVAAVPQKKGGEWRITKLIDRPVSDVALCDLDGCGEDELVTIEPFHGNQFVVNKKTANSYEIVWQYPNEIDFAHTVVGCSLLGKPAVVGGIRRKNCELFVLLYEQGKGFFTELIEEGVGTSNAAVAHVDGTDIIIAANHTKNEAAVYIVKD

SEQ ID NO: 106951 - protein, 66 aa, Unknown
  Obtained from environmental sample
  DOMAIN (6)...(66): PTS system, Lactose/Cellobiose specific IIB subunit
  misc_feature (1)..(66): Xaa is any amino acid
MPKNLKIIVACTNGAGTSLMMKMSVEKATKELGIPVEKIHHCAMAEGKSSASQYDVAFVPLNFINM

SEQ ID NO: 106952 - protein, 235 aa, Unknown
  Obtained from environmental sample
  DOMAIN (7)...(105): 5'-3' exonuclease, C-terminal SAM fold
  misc_feature (1)..(235): Xaa is any amino acid
VKAEWGVVPEKILDLLSLTGDSSDNVPGVKGIGEKTAVELMTRYGSLDEIYKNIAGIEGAKGRKLAEGKESAYFSQSLIRLDTSVPLPVSDIEKLSAENLNRLAAARILFREGLRQSAKQLDPDVGAHNAPDSAPVPDSAPTGVGVSADAGAPSSKAPSGEQQAPDIYSTYSSDKSLFGAGVYKIILDLAELESILAEAHKQKLLALDFETDSLDAWNSRPIGISLALKPKEAYY

SEQ ID NO: 106953 - protein, 115 aa, Unknown
  Obtained from environmental sample
  misc_feature (1)..(115): Xaa is any amino acid
MANSSPWLAFEQPGAVHILPVSHGEGRLVIRHDEGEALFKNGQVPFCYAGADGQPALYEPDNPNGSDFAIEGLCSPDGRILGKMGHSERRGEYVHINIPGNKRQNIFEAGVRYFK

SEQ ID NO: 106954 - protein, 244 aa, Unknown
  Obtained from environmental sample
  DOMAIN (1)...(244): Bacteriophage Mu P protein
  misc_feature (1)..(244): Xaa is any amino acid
ARDIIDSAWSEDFADMTVLDLAKTIGGRFGIKCHALPPSIAGKMQPIYAFRIQNESPWVKLANAADNEGYMLTSNEAGDLYFWEVSAAVRDEGFKLAEGANIKSIEFIENGAEQFHEYVVTACGKEAKAIDDSCPVGRILTMDITDWDFPEAKLQRRADTEMRRRKETKAVVTVPGWGLTDGQIQRLGSATTGKEIFWAPNLLIPVIAPSVGLDAKLLIAEVEHEAYPGVFESRVTVVKREAYL

SEQ ID NO: 106955 - protein, 237 aa, Unknown
  Obtained from environmental sample
  misc_feature (1)..(237): Xaa is any amino acid
THDRLRANDNIAPSTPGVQGRLGLKLPASWAGEKANLALGVGGLYAKDEAAADDDNDKRKGPDPIKRSSANMFGADLSLPVIDILTLTGEFFMGQNLSRYGDGSLGLNYTSSSNPEKVRKEGIKSKGWWGALAAKLPVNLSAAAGLGMENLDGDVKLDVNANNKLDESTVIPGSRKDNMFIFANLAYNFTSAAKVTFEYLNLSTDFADKLNKDGNALEKVDSGSLNRFELNFRYDFK

SEQ ID NO: 106956 - protein, 285 aa, Unknown
  Obtained from environmental sample
  DOMAIN (146)...(285): Adenylate and Guanylate cyclase catalytic domain
  misc_feature (1)..(285): Xaa is any amino acid
MIVTTDAQGQIYYFNEPAAEVMGLTQEDLGRSLENTFRNSLSSKTLKTILKSLEDGNEILGLEGIYRKGDKELDYSLNVTPLKTPRGRKEGLTLLFTNQTREKELKQTVQIVSEERRVIKDMFARYMSNEVMTRLLETPDSVKLGGDKREATVFFADIRGYTSFSESRDPQVIVEILNEYFSEAVENIVQHKGYIDKFIGDCIMAVWGVPMMPEEDDAIKAVSCAITIQELVRSTKRKFFRKSNASHLRIGIGVNTGPLVAGNLGSIQRMDYSVIGDTVNLAARL

SEQ ID NO: 106957 - protein, 240 aa, Unknown
  Obtained from environmental sample
  DOMAIN (31)...(206): ABC transporter
  misc_feature (1)..(240): Xaa is any amino acid
MTIEINGITMIYSSGKQALDNVTMQMESPNLIGILGPNGAGKTTLMKLLIAGLVPTRGEILLDGKALLSEEKRLKSQLGYLPQSFGLYDELTVWQFIDYMAALKGIKDKATINEALEQASLTDHRKVRIRNLSGGQRQRVGIAQALLGSPHLLILDEPTVGLDPEERVKFRNLFSEMASDKIVILSTHIVEDVQSICNRVLVLNSGQILFDGAPADLIAKTMGHVGIFVSQITAEVQKDY

SEQ ID NO: 106958 - protein, 93 aa, Unknown
  Obtained from environmental sample
  misc_feature (1)..(93): Xaa is any amino acid
KTANRASAGRISADVTNGYRPEQFLLKNAITGRSRVYVNYFSDRQVTSAGPSTVMAEIYTKYADKAEQRRIVCLQMSNAKRTDGKVEVAVFEF

SEQ ID NO: 106959 - protein, 225 aa, Unknown
  Obtained from environmental sample
  misc_feature (1)..(225): Xaa is any amino acid
MVELQRIALRAAKARAQAEGAQLRLGEIQRELSQLSAKKTATEKQLAALKDSLRRQVKWLYALGPLGTLSFLPGSADIENYLARGRYLEWWRNHEGQKLQKAFELHSELEAQEKEAKDAQSRYSKLSREMASLEEELKANEEQLYAYLEGIQRDESQKRAMQAEMNEESILLERMLASVVSKPSPAVPTPSGVSFQHLVGRLPKPVEGSLATAFGVQVHPRFGTR

SEQ ID NO: 106960 - protein, 222 aa, Unknown
  Obtained from environmental sample
  DOMAIN (2)...(203): Glutamine amidotransferases class-II
  misc_feature (1)..(222): Xaa is any amino acid
MCGIVAYIGDKPALPILLNGLKRLEYRGYDSAGVSVIVTASGKIETVKAVGKIRALESRINGNDGDGGAKPNLDGTIGISHTRWATHGEPSIANAHPQLSADGKIAVVHNGIIENYASVKKILESEGVKFVSDTDTEVIAHWISRFYGGNLAEAVQEALKSLEGAFGLAVICETEPDVLIGARRGSPLILGVGGGESFLASDVSAVVEHTQKIVYLEDDDVV

SEQ ID NO: 106961 - protein, 165 aa, Unknown
  Obtained from environmental sample
  misc_feature (1)..(165): Xaa is any amino acid
MLKRHGYSYVIVDCWYIKPKREMRWEERRYRPYIARYGGEEIVVIPRDRELSDAQESGLDPGWFQHEIYERTKWCDFPALVTTWTDGENGGWFRSTDITASFWGCFYHEILNRYRAGTLGFIPTHIKEYIDKFPPEEEVEVHRGAWNTGDHWGGDFTQWTGGCSK

SEQ ID NO: 106962 - protein, 248 aa, Unknown
  Obtained from environmental sample
  misc_feature (1)..(248): Xaa is any amino acid
MSAYDAAPAGPDGSQPSGDDVAGQLDALFGGAEEPALAEAAAPEDGLTPADDHPTGDDLAGQLDAMFGGASEETAEEPALAEAAVPEEGLTPADDHPTGDDLAGQLDAMFGMAEPSGEAVPTDEPLLTDESILTEESLSTDESVLTDESALTAEAALTDELASLTADQDAQPSGDDVAGQLDAMFGGAAPPSTPAPVGETMPVEESVLIDESALTAEAALADESAASLTDVQDAHPSGDDVAGQLDAM

SEQ ID NO: 106963 - protein, 270 aa, Unknown
  Obtained from environmental sample
  misc_feature (1)..(270): Xaa is any amino acid
MAVEDVMTVDIDDAVGATEAVDAVDTVDTVDTVDTVDTVDTVDTTDVVDTVDTVEAVDSVDTVDTVDTTVDTIDTTVVGTDIVTEEVVDPDNIVDTEDVIGTDTVTDGVIDTDNIVDTDGMISTDTVTEGVVDPDSVIDPDSIVSTDGIVDNADGVVDTDSIVDPDSIVNPDDLVNIDDVVNASNELGTNDVVEVIDMDTLSGFSKDDNAVDIINTTDALDNIDAIGLTDTPDDVGTVDTVDTIDTIDTIDTIDTIDTLGNIDIASLVIS

SEQ ID NO: 106964 - protein, 278 aa, Unknown
  Obtained from environmental sample
  DOMAIN (127)...(219): Mur ligase family, glutamate ligase domain
  misc_feature (1)..(278): Xaa is any amino acid
YRDDKANLFRALDRGQLKFPAFPDPFGVINADDPSAEFFENATQRETLSFSVKGKDADLMVKSIESGAMGNSYKVYIRKERTNIDIRDNLPGAFNTGNVLASLLVVSGLTKIPVRELTPLCPKLLPVRGRMTAVDKGQNFEVLVDYAHTPSSFQTIFPPLRARLDSSGSPRRRIITLFGSAGERDTQKRAEQGKIAARYSDIIILTDEDPRGEVPIDILNEIARGVYAEKSALFKQNENVFFIPDRPAAIRKAFSLAREGDLVLLLGKGHENTIIYKD

SEQ ID NO: 106965 - protein, 108 aa, Unknown
  Obtained from environmental sample
  DOMAIN (18)...(108): Hpt domain
  misc_feature (1)..(108): Xaa is any amino acid
DIATALQQLAGSEKLYLSIITKFATMYKDLPDTIQADLEKGDLVKVQRDAHTVKGLAGTLGHGALREAAAQLEHGAAEGNAAECAQHLVPFREKFAQVLGSLQNILNA

SEQ ID NO: 106966 - protein, 158 aa, Unknown
  Obtained from environmental sample
  misc_feature (1)..(158): Xaa is any amino acid
VHVPRTISPGVLRAMAVEGVLASESYEAALRFLGIRPGPRQWICFWQRALSVCGVLFFAAGVICFFAYNWAELHHLAKFARIAALTLLNGSMFYAFRMFEPLRAMPGIGAGIGLMYFAHILTKTLAGTARMRRFFLGLAVLALIGGWFLPGISIGLLG

SEQ ID NO: 106967 - protein, 230 aa, Unknown
  Obtained from environmental sample
  misc_feature (1)..(230): Xaa is any amino acid
MQEILAPAEDAAPPYCPHQGACGGCAWPGLGYAEELRWKERHVRESLRRLGGLGEAADSLVAPIVPSPRQLGYRNKLEFAFAPDAGGGVALGLKCRGTHRIIPVSDCALAPSSVAELLAFTRRWAEEKALSAWNGKTGFLRHLVVRRPDYAPQGIPQCQVELIVNSAAHAGARDAACAFGPSLRQAVPEVSSFVLSQRLQRADVAYGERVLLAHGDEHIRERIGPLLLEA

SEQ ID NO: 106968 - protein, 92 aa, Unknown
  Obtained from environmental sample
  DOMAIN (6)...(79): Bacterial export proteins, family 3
  misc_feature (1)..(92): Xaa is any amino acid
MNELIILELGRQALKTALYVAAPALLVSMVVGLSISMFQVVTSLQDQTVAFVPKVLAVMTVVVLSFPWMVRVLTQFAAKMFTDFNIVTRMLT

SEQ ID NO: 106969 - protein, 97 aa, Unknown
  Obtained from environmental sample
  DOMAIN (9)...(91): Nucleotidyltransferase domain
  misc_feature (1)..(97): Xaa is any amino acid
MDARIFNDIQVLKRQLLPDEKLILYGSQARGDAREDSDWDLLVILNKKGKHNWTDFDRYAFPFEEIGWDYGIAINPILYTQEEWDKGTCFPFYKNVM

SEQ ID NO: 106970 - protein, 181 aa, Unknown
  Obtained from environmental sample
  misc_feature (1)..(181): Xaa is any amino acid
MIQQIKKSFVIGCIAMIQPLLMLAQPTGNIRGVVTDGASGQALPYVSVVVLRSEPAIGTTTDEEGHFSLNGLPIGRYDLQSSFVGYETVISKEILVSSGKEVFLEIVLRENVQELKEVTVRVKVNKEAPLNTMAVAGARMLSVEEASRYAGGFDDPARLVTAFAGVSGSMNSNGIAIRGNL

SEQ ID NO: 106971 - protein, 64 aa, Unknown
  Obtained from environmental sample
  misc_feature (1)..(64): Xaa is any amino acid
NQEMRMTVIMVSHDIEVADCATHALHLQKRQLFFGSMEAYRQSETGKKFFVKPGASAGSGAGSA

SEQ ID NO: 106972 - protein, 239 aa, Unknown
  Obtained from environmental sample
  misc_feature (1)..(239): Xaa is any amino acid
MEGIVPGPNERGWVTVEELAAKYAAMQQDNPEGLSRDVTVNDAISVINAIGSAPRYKDCRLFAYTNNIDLDQEKQFAAYCVIIGRKRLSRKMLVVYRGTDMTLIGWKESFNMSFITSVPSQKEAVSYLEKISRRFLYPLIIAGHSKGGNLAIYASSFCGKLVRRRIIAIYSNDAPGFHKEVIQSSGYQAICPRIRAFIPQSSLVGMLFEHGETPMVIKSGASGPMQHDLCSWEVTYNNM

SEQ ID NO: 106973 - protein, 231 aa, Unknown
  Obtained from environmental sample
  misc_feature (1)..(231): Xaa is any amino acid
ARFLKLFKHGFDFSILALGIALILAGVFEKHGLAMIIGAYIAGLSLSRTDIAAVIQERIRGIYEFFVPVFFAVMGMMVNVKEIVSPQALMFGAVYTGVAVLSKIAGCGGPAMLMGFNVRGSLRIGAGMVPRGEVALIIAGIGLASGILDQQIFAAVILMTLITTLAAPPLLSATLKIAGAGTRKPVKGDDSVLLKWEFSSAEIADVVINTLLNDLRSEGFYVQMMSLDEGL

SEQ ID NO: 106974 - protein, 191 aa, Unknown
  Obtained from environmental sample
  DOMAIN (27)...(172): ExsB
  misc_feature (1)..(191): Xaa is any amino acid
MITIDTNITAAAEKHERLKQYLRTLGSVAVAFSGGVDSTFLLKTAHGVLSDRAIAVTARSSTFPQRELTAASEFCGGEGIRHIICDSDELHVDGFAQNPVNRCYLCKSELFTKIRAIAKDEGVEHVAEGSNVDDDGDYRPGLEAVREQGIKSPLRHVGLAKAEIRALSKEIGLSVWDKPPFACLASRFPYG

SEQ ID NO: 106975 - protein, 104 aa, Unknown
  Obtained from environmental sample
  misc_feature (1)..(104): Xaa is any amino acid
IRLFTLLGWSYYGEKGVEYILGTGSITLYRLIFVIVAYLGTVLSLDIVWNIADALNALMIIPNLVAVLLLSGVIAAETKKYLKGDHIDDVDDTPVPLRKDLREE

SEQ ID NO: 106976 - protein, 218 aa, Unknown
  Obtained from environmental sample
  DOMAIN (27)...(216): ABC transporter
  misc_feature (1)..(218): Xaa is any amino acid
MLRVRDFSFSFNGSPALQGLDFALPPGGCLSVIGPNGAGKSTLLKCLARLHEGGRSSGEIRVKDRELAAYGQRELARIISYVPQAGGWIPPFTVEEFLHLSRYPYGFSGPAAREAARRAVADALALTGTENLAGRSLKTLSGGERQRAYLAAALAQEAELMLLDEPVSFLDPRHAADMHKLLRNLNRDQGLAMITVTHDLNYPLSIGGDVLVLREGRQ

SEQ ID NO: 106977 - protein, 239 aa, Unknown
  Obtained from environmental sample
  DOMAIN (6)...(228): Bacterial extracellular solute-binding protein
  misc_feature (1)..(239): Xaa is any amino acid
LQTAEDKAWLDGFYPGFMENSSTGGKTYGIPWQRSTIILYYNKDAFSQAGLDPDKPPATWSEMRSMAKQLTKKENNNTVQYGIQIPSDKAGYAYWMLQTFCTQQNGFNLMNDAGTEVYFDDPRTIKGLTFWKGLSDDGSQAPGTSAWSTTPTDFLQQKTAMIYHTTGNLTNIRKNAAFNFGTAMLPADLSRGSPTGGGNFYLFKGVPKTQTEAAFTFIKWMTNDPERVAQWSIDTGYVA

SEQ ID NO: 106978 - protein, 141 aa, Unknown
  Obtained from environmental sample
  DOMAIN (6)...(128): PIN domain
  misc_feature (1)..(141): Xaa is any amino acid
VKKIKLYLDTSVISYLDAPDTPEKMTDTLCLWEELKSRSDIEIVVSELTLRELNRCQQPKLQFLLEKLNEFDYLLLDISEDDKNLANHYLKNAVLTEKSIDDLMHIAIATLNDCRYIVSWNFQHFVNPKTIHAVWAINKMK

SEQ ID NO: 106979 - protein, 129 aa, Unknown
  Obtained from environmental sample
  misc_feature (1)..(129): Xaa is any amino acid
MYKYILALLCLSFMMACKNNNVAKDVTEVTVTDDAIVIEENSPVLEQIVVQKAELKDFSAEFHTVGTVRPVVGKLAEIAPPFAGRVIKSFVKLGQKVGAGSPIFELSSAEFNEAVKSYFSAQSANEVAQ

SEQ ID NO: 106980 - protein, 210 aa, Unknown
  Obtained from environmental sample
  misc_feature (1)..(210): Xaa is any amino acid
LLNTDNFNKLLGFNNKSAVRSSIINEIDAFLTSTYDHILRISFENIPSSFSAKEIVSNALASYLLNKARDKKFVENPIVLIIDEAHQFLNKNVRDEYFEIQSLDAFDLIAKECRKYGLFLCLATQMPRDIPIGTLSQMGTFIVHRLINEKDKQSIENAASSANRNMLSFLPILGEGEALLIGVDFPMPLLIKIDIPKKPPKSNTPYLRPR

SEQ ID NO: 106981 - protein, 198 aa, Unknown
  Obtained from environmental sample
  misc_feature (1)..(198): Xaa is any amino acid
GPEHWHPAPEFFYKPGGGPMFDVGPYYITALVSLLGVVARVSGSAKVSSPTRIITSESLNGAIIKVEVPTHVAGTLEFARGAVGTIITSFDVYSHTLPCIEIYGTEGTLRVPDPNTFGGPVYLRRFREEEWSQIPLINNYTEDSRGLGITEMAAAIEQGRPHRASAELAYHVLDIMHGIHEAAADGKYYKVKGLGTRD

SEQ ID NO: 106982 - protein, 220 aa, Unknown
  Obtained from environmental sample
  DOMAIN (2)...(217): Mandelate racemase / muconate lactonizing enzyme, C-terminal domain
  misc_feature (1)..(220): Xaa is any amino acid
MVRDSLDAIRRGYDTLKIKVGKEPEKDLARLKAIREAIGYAPRVRIDANQGWKPREAVRILCGMEDAGLEIELVEQPVIAHDVIGMKYVRDHISIPVLADESVFSPLDAIKIMQMEAADYINIKLMKTGGIYNALKICSAAEVYGVECMIGCMLEAKISVNAAVHLTCAKGIITRMDLDGPVLCSEDPITGGSVFNEKDITVSEAPGLGIKGIEKITYLD

SEQ ID NO: 106983 - protein, 269 aa, Unknown
  Obtained from environmental sample
  misc_feature (1)..(269): Xaa is any amino acid
MPDSWMQAYKENPNGAHEVYNPRNKNGYVIPKQLIPGKYDISKLFKLEDYNALPEIERPEVWTKREVFRVIVDCAWQTGEPGLIFIDAINRANPTPNIGEIEATNPCGEQPLLPYEACNLGSINVSAFVYKDDEGKIEVMREALVETIHLATRFLDNIIDVNKYPIQEIDTMCKGNRKIGLGIMGFADTLYKQELPYNSEQGISLGERLMQVINEESHNASEILASERGKFPNWAGSVWDTVQKRPMRNSATTTVAPTGTVSIIANCSG

SEQ ID NO: 106984 - protein, 264 aa, Unknown
  Obtained from environmental sample
  misc_feature (1)..(264): Xaa is any amino acid
ARRTKALYGVARVEISLDNGRSFTPAVGTGDWKFRLETSQLAEGILPIIVKATFHNDDVAVRRILLIVDPREPSVNVIGPDENSGHRTTIRVFGSTVDDYDMDSVEVSLRPGDKLGYTVPGFIQGLYLDGSVLGSMNFCAGIGLSFFEDNVKVQANVSQAPSGRYSGWAFGGKILANVWTKNLGDWFGPDWSFWKTSFVLGAHFSYFLMEEGETPLWMGEFLGQWEVIKSDMSFFFPNWKYFKSLSFYVEPGIWIAPSDVTYDP

SEQ ID NO: 106985 - protein, 245 aa, Unknown
  Obtained from environmental sample
  DOMAIN (1)...(245): Urocanase
  misc_feature (1)..(245): Xaa is any amino acid
VSLNIECQQTSIDFRLRTRYVDVQAKDVGHAIELIKSHAASKEAISIALLGNAAEVLPELAAKVKTGAVAKPDIVTDQTSAHDLVNGYLPIGWTVEQWKAAQIDPSKHAELKAAAGKSCAVHVQAMLDFKSMGCAVVDYGNNIRQVAKDNGVTNAFDFPGFVPAYIRPLFCEGKGPFRWVALSGDPDDIYKTDAKIKELFPQNKHVHRWLDMAKERISFQGLPARICWLGLGERHVAGLAFNEMV

SEQ ID NO: 106986 - protein, 151 aa, Unknown
  Obtained from environmental sample
  misc_feature (1)..(151): Xaa is any amino acid
MSEKKREKIFYTTAFDKNGFLVKAKDAEKKEDYICPECKDFLMLKKSGKTGKGSRRPHFAHHAVSPNCTPEGVLHKSFKLLLLEKIKKQITEKTPINIEWECLFCHTKLKGNLLFYAADIKEEYSFENCRADLALLDRDNNAFAVIEIIVT

SEQ ID NO: 106987 - protein, 268 aa, Unknown
  Obtained from environmental sample
  misc_feature (1)..(268): Xaa is any amino acid
MKLINILAFLLIFFSQSVTAQDNLNKEWLDKDRRIFNNTLLVLQKGEFDLNTLKNLKDIKVSNEDGNLGLGYKKTAYYYGGGYTAVSFKLLLDPDNNIIKHRITISGNLDAFNVLDKEYQLYIAFNNYKKETYTNRISLKSEKTDGELFSKMIVCFNDYFGIKEEINIPEKIYSDYSALIDPFDEDVYGFVVGIGASVPDSRSAIERIKKEKNKDILKLIMASPNPTGRIYAIEAISGGKPINIFKYKEYSYMLNKLFKLRIPIEAGS

SEQ ID NO: 106988 - protein, 256 aa, Unknown
  Obtained from environmental sample
  DOMAIN (1)...(69): FliG C-terminal domain
  misc_feature (1)..(256): Xaa is any amino acid
LREVDMSTLAVALKDAKEEMKDVFFRNMSKRAAMMLEEDMEFMGPVLELDIENARQLILDIYADLPKEKYNRFDDQWTKYKTDKENNTKYRAGADNRDHIVLVFRGAGTIAEFVSVYQFDEYNKVDNFCHHLNNLKPDKGSFFYAKHADQMFEYEITKPLLASFDQIFEYSRIHNDDNGSTIMREALKKVSSNTILQALKGVDKRSRMIIMQSLPVKTTDEINECIERSDYTDYFLFSESRKAQQEIINAVNKAYS

SEQ ID NO: 106989 - protein, 254 aa, Unknown
  Obtained from environmental sample
  DOMAIN (7)...(153): Peptidase family S41
  misc_feature (1)..(254): Xaa is any amino acid
MTIDRSRDAIRSFTSNNYKGLILDLRNNYGGLLNSAVDVCNLFSESGIVVSTKSRIASENMVFYARRGRAMVGANIPVIVLINRGSASASEIVAGALKDWGRAYLVGERSFGKGSVQQVYPLDKVGFKITTARYYTPSDVNIDKIGIPPDREVSFPELSDMDAIKLNNVINSGKVSDFVVGNPAANAEAINAFLRSLSSEFNLDIPLLRRYVREEQNRRSLAPVYDLEIDVQLNEAVKILTEENFRALMQTSKT

SEQ ID NO: 106990 - protein, 268 aa, Unknown
  Obtained from environmental sample
  DOMAIN (115)...(268): Cytosol aminopeptidase family, catalytic domain
  misc_feature (1)..(268): Xaa is any amino acid
SEALRVIRIDNEYSHPVLFVDTGKETGLDPLDHLRMAGYRLAKWAENNAIKTLMIPPLKEDSLEKRYAILQGLCHASYTFEKYKSKKHKRTDVEYLFADNMEIDGNSLQTLFSGIDFAKDLINEPGNALTPAIMANIAQSIAHKYGLAIKIRRTKELEKDGYNGILTVGRGSKNEPAMVTLSYKPKQKCIYHLAYVGKGITFDTGGICLKPQDKMSEMKCDMSGAAIVLAAIKVIAELKFPIEVDAILCLAENRPGENAMLPGDIFMA

SEQ ID NO: 106991 - protein, 146 aa, Unknown
  Obtained from environmental sample
  DOMAIN (58)...(146): IstB-like ATP binding protein
  misc_feature (1)..(146): Xaa is any amino acid
MSQTAPTTLLLEHHLKALKLPTILREYVAVAEASAKERVDYPGYLLRLAERELLDRERKASDKRLRDARFPVIKTIDSFDFTAQPEVNEALYRELLRGEYIENRENVLLIGNSGTGKTHLATALGFAACAQGKRVRFSTVTALVAE

SEQ ID NO: 106992 - protein, 159 aa, Unknown
  Obtained from environmental sample
  DOMAIN (1)...(157): Ketopantoate hydroxymethyltransferase
  misc_feature (1)..(159): Xaa is any amino acid
MKKNGEAISMVTVYDAAFARMAEAAKIDMLLVGDSGANTMLGMERTAGISMEAMCIFTGAVKRGAPNSYIVSDMPYGSDAEPKLAVQNATRLLEAGAHAVKIEGLPLESLKALREKKIEIVGHLGLLPQTAKSFKQVGKNEDEAEKILNKRKFRQFESC

SEQ ID NO: 106993 - protein, 265 aa, Unknown
  Obtained from environmental sample
  DOMAIN (1)...(202): Elongation factor Tu GTP binding domain
  misc_feature (1)..(265): Xaa is any amino acid
FFDTPGSSDFAGNVILSFRAAEFALLMVDGRSGVQIETVKLWRSLDAQKKPRGVFIAKLDNDQTDFNKALTDIKEKFKMEPVPVTIPMGTGGAFKGVIDVLHDKAYLAGGDGVEKECPIPDEFKDASKAARERLIEAAADGDDGLMEQYLEKGTLGPEEMKKGLIKALVDNKYIPAFAGSALKNSGLLPLMDFIANVGPNPRSAKDAVLGGDGKAHEISIDPDKPLSALVIKTTYDQFSGKLSWVKVISGKLAADTEAMNVSENK

SEQ ID NO: 106994 - protein, 287 aa, Unknown
  Obtained from environmental sample
  DOMAIN (12)...(287): Bacterial extracellular solute-binding protein, family 7
  misc_feature (1)..(287): Xaa is any amino acid
GSARGDVVNIRLASPLPRSSDWGRALDRLAADWEKGTQNQVRVIVSHDGREGSEGRMLSSLSSDAIQVAVFTSAGVAEICPAVMNLSIPFIIRNEEEFDLVLENMLPVLNSRVKSDYVVISWSKGGWVYIFSKEKVLTPDDLRKQRLATSPDLKEMNTVFRVMGFQLVETDMVSTGTKLASNAINAIYIIPAVVAPMQLHKSLNHMLDLPIAPILGAIVMNRVTWNKLSPASQQEILKATRKVADEFDASVVRTEANAITAMGRDGLSIHKLTKAQQDLWSNEVKNN

SEQ ID NO: 106995 - protein, 170 aa, Unknown
  Obtained from environmental sample
  DOMAIN (1)...(125): ABC transporter
  misc_feature (1)..(170): Xaa is any amino acid
DDLVSLVYDETAFALRTRGVPETDVKARVHEALEVCGLYPFRNWPVNALSYGQKKRLTIAAILALRPSFMILDEPTAGQDYRHYTEFMEFLLGLNSDLQISLLLITHDMHLMLEYTSRAVVLSDGVCVADQEPFEVLTDDGIIERASLKRTSLYDLALKAGLPDPRGFVG

SEQ ID NO: 106996 - protein, 167 aa, Unknown
  Obtained from environmental sample
  misc_feature (1)..(167): Xaa is any amino acid
MKKFVCVFILLFFVSVLAFSQAVTLDNALRNSTTYLNSRIKANTKVVVLNFTSDWPRLSDYIIDELIGYVVNDGTFTVVDRNNLETIRKELNFQLSGEVSDETAQSIGKMLGAQTIINGNITAIGSSYRLRVRAISVESAQIIGMNNVDVAQDSRIAALTGTASATP

SEQ ID NO: 106997 - protein, 289 aa, Unknown
  Obtained from environmental sample
  misc_feature (1)..(289): Xaa is any amino acid
MVKVYWTGEEVRNGSSTQFNTTTLETFNYAYLGRAIFHAGGDEALHNTRYAQFGVYEGALTEQQVKGLADVALTALNGRIESVTWDVIPNLIASKPNVAAGVTVGTLIIQGGKPPYSAAFIDGTGSTDNGLFDIDQTNLSLKVGTTALTDGTKTVRVRVTDADGQTFEKVCTLTVGVAPPSPTFHYDFTGYTSGTSVTPTVGNGTGTLNTGATIETITGKPVLKLDNSSSPYFTLGNKTDVGSLITNVPAFTISTYMFIGSTTSLSGDGWHPWVFSSAATISDTNSQEP

SEQ ID NO: 106998 - protein, 49 aa, Unknown
  Obtained from environmental sample
  misc_feature (1)..(49): Xaa is any amino acid
MEKEPILSAKDVEIRFSLRGRKLTAIRKCSMDLFEGETLAIVGESGCGK

SEQ ID NO: 106999 - protein, 217 aa, Unknown
  Obtained from environmental sample
  DOMAIN (16)...(217): Binding-protein-dependent transport system inner membrane component
  misc_feature (1)..(217): Xaa is any amino acid
ADNIGRDYWCQVWYASQTSIKLAALVGLGECIVGIVIGCIWGYVRKLDRLITEVYNIINCVPMIIYMTLIALLVGQSFTIMAISLVAFGWLIMARNVRNLVFMYRDREFNLASRALGTPISRILLRNILPQLISVIILRLALSIPATITMETTLSYLGLGLDVNTPSLGILLRNARSYFLDYPYLLIFPAVIVSLITITFYLIGNAFSDASDPRNHV

SEQ ID NO: 107000 - protein, 276 aa, Unknown
  Obtained from environmental sample
  DOMAIN (94)...(274): ATPase family associated with various cellular activities (AAA)
  misc_feature (1)..(276): Xaa is any amino acid
DGQTYEALANLAVRLLPTIRRLWLDSVSCLPSAAYATKPIPMAPVRECRIMATLALKYRPRILSDLVGQEASVKALHNALTRAKAVGGAIHHQAFLFAGVRGTGKTSTARVMARSLNCAEGPTPTPCGTCGPCLASEQPDRNMDIVEIDAASRASVEDARALREQVHTRPAFCRYRVYIIDEVHMLSRQAFDALLKILEEPPPHAVFVLATTELQDVPDTIQSRVQIYPFRLIPVGLIEERLRLVCDSEGVPHEPGSLRLVAEAGQGSMRDALTTL

SEQ ID NO: 107001 - protein, 69 aa, Unknown
  Obtained from environmental sample
  misc_feature (1)..(69): Xaa is any amino acid
LDKESTAIVQAILSLAKALDISVTAEGIENADQLGLLRELGCHIGQGYYFSVPLPPQDAEKMMEQDPVW

SEQ ID NO: 107002 - protein, 88 aa, Unknown
  Obtained from environmental sample
  DOMAIN (1)...(88): Bacterial DNA-binding protein
  misc_feature (1)..(88): Xaa is any amino acid
MIKLDIANALMLAYPCSRDTALSVVNLLTSKMKDALLEGERIEIRGFGVFEPRTRKRGFGRNIKTGQSVKIPSGKSVRFKPGKSLRYI

SEQ ID NO: 107003 - protein, 73 aa, Unknown
  Obtained from environmental sample
  misc_feature (1)..(73): Xaa is any amino acid
SAKISLPGGKAFEVATVGQSKENVYVQSVSLNGKPLNRAFITHDEIAKGGKLEFKLGPTANEGLKSLEVPPGF

SEQ ID NO: 107004 - protein, 51 aa, Unknown
  Obtained from environmental sample
  misc_feature (1)..(51): Xaa is any amino acid
MANIVPKEALAYLKNKNLKVGFSYKDVWHEEHATAFTVRQAMQLDVLSDLH

SEQ ID NO: 107005 - protein, 251 aa, Unknown
  Obtained from environmental sample
  DOMAIN (96)...(162): His Kinase A (phosphoacceptor) domain
  misc_feature (1)..(251): Xaa is any amino acid
MREQYKIESDCVGQFGYKVFHEDMEGICDFCPCYQLDKEPESTVVWEEQNSLAGRVYRNTDRYIEWYDGRIVHIQHSVDVTELIAAKEQAERSSRFKSQFLSRMSHEIRTPMNAILGITEIQLQNETLGPAIQEALDRIYNSGYLLLGIINDILDLSKIEAGKLEITPVNYDVASFISDTVHLNIIRYESKPIKFDLQVDENIPATLFGDELRIKQILNNLLSNAFKYTNAGEVSMSVAAEYMQGEKPQVT

SEQ ID NO: 107006 - protein, 236 aa, Unknown
  Obtained from environmental sample
  DOMAIN (23)...(110): Divergent AAA domain
  misc_feature (1)..(236): Xaa is any amino acid
VENQKIEWTRQWRDEFLKGLCGLANAQGGTLEIGRGDDGVVVGVDNAKRLLEELPKTIRLTLGVVPSVELLTEGGREYIAVSVEASGTPVSFHGRYYLRSGRTTLELSGGLLNSFMLRKTGKAWDGAAVPPAAVADGGVDGVDGGVCGDVNYADGGVSCMDGGVNDSDDGVKGAVYGINTDVGGADGGVSGANGGVNGSDSGVNTAAGGVFGGVNDFRKTILELMRVIPTISAQRI

SEQ ID NO: 107007 - protein, 233 aa, Unknown
  Obtained from environmental sample
  DOMAIN (114)...(233): Methyl-accepting chemotaxis protein (MCP) signaling domain
  misc_feature (1)..(233): Xaa is any amino acid
GTLKDISEGEGDLTRSISASSKDEVGDLALYFNKTIKKIKNLVLLIKRQAGVLSDIGSDLSSNMTETAAAINQITANIQSIKSRIINQSASVTETNATMEQVIVNINKLNGHVENQSRNVSQVSSAIEEMVANVSSVTNTLVNNSANVTALKEASEVGRTGLQDVATDIQEIARESEGLLEINAVMENIASQTNLLSMNAAIEAAHAGEAGKGFAVVADEIRKLAESSGEQSK

SEQ ID NO: 107008 - protein, 87 aa, Unknown
  Obtained from environmental sample
  misc_feature (1)..(87): Xaa is any amino acid
LKGLLIYYGVEPEFTHNIEVLLNKLKAFTDIPENIKEAVQLTIYAVQTRYPGEYDEITKEEYEKSVKMAKDCLTWIENEITEKDKSK

SEQ ID NO: 107009 - protein, 68 aa, Unknown
  Obtained from environmental sample
  DOMAIN (4)...(49): SpoVT / AbrB like domain
  misc_feature (1)..(68): Xaa is any amino acid
VNTVTLSNEYQIIIPEEISKSIGLEPGSSFEVLSYNNRIELIPLSPIKELKGIFKGIDTNIERYDDGV

SEQ ID NO: 107010 - protein, 256 aa, Unknown
  Obtained from environmental sample
  DOMAIN (25)...(142): Oxidoreductase family, NAD-binding Rossmann fold
  misc_feature (1)..(256): Xaa is any amino acid
KLSDGMNFAPRGKPSPVVQKGEFTFAAIALDHGHIYGMCNGLIEAGGVLKSVYDPDPKKLDDFCAKFPSVKRAASEEEILSDPQVLLVAGAAVTSERCALGLRAMSAGKDYFTDKAPLTTLEQLAAAKAKAKETGKKYMVYYSERIHVESAVFAGQLIEQGAIGKVIQVLGLGPHRLGAGGRPDWFFKKEKYGGILCDIGSHQIEQFLFYAGEKDAKVVSSQIANYNHPQYPELDDLGDATLVGSGGATHYFRVDW

SEQ ID NO: 107011 - protein, 197 aa, Unknown
  Obtained from environmental sample
  misc_feature (1)..(197): Xaa is any amino acid
MTFGYDPELMSIDPYQGAKGSVREALAKFSCLGGDYRKARLSFQEYFERPRTKESWGKPAAALLGALEAQIRLGIPAIGGKDSMSGNYRSQETELTVPPTLVAFAAGITQASKVRSGALSNEPGNTIILLSQAARDGIDEWDVFKMNMKTLEDLSAANKVRSAYPVGSGGIAVTLAIMAFGNMTGVEAYEPVLSLID

SEQ ID NO: 107012 - protein, 144 aa, Unknown
  Obtained from environmental sample
  DOMAIN (1)...(87): Transposase
  misc_feature (1)..(144): Xaa is any amino acid
IVINTMKMKVVNESVKKTDKHDAATIAEFLEKDMLPESQLCSRESEQMRRLLKVRTTLVRAEVVIKNQIHGLLTAEGLEDVKGSLQSKRGRLRVLNTLKTNEQGLVIHPLFETIEQLEAQIKGIETQLRGLAKGDRMVEWTLPH

SEQ ID NO: 107013 - protein, 265 aa, Unknown
  Obtained from environmental sample
  misc_feature (1)..(265): Xaa is any amino acid
VALRNSTLSVYNLNSAVQKIIDRIIFLRIAEDKGMENANILKTITNAVNIYEKFNVLVEKANIKYDSGLFDSEDWLLHLIVDNKVLKNIIDNLYYPECPYEFSVLPVEILGNIYEQFLGRTIHFRNVRNSRTVIVEEKPEVRKAGGVFYTPQFIVNFIVKNTVFEKIQNKTPDEITYLRICDPACGSGSMLVGAYQCLLLYHLDYYTDEKNIKKALKKGLIFQVFHDSYRLTIFEKQRILHNNIFGVDIDPQAVEVTKLSLYLKL

SEQ ID NO: 107014 - protein, 150 aa, Unknown
  Obtained from environmental sample
  misc_feature (1)..(150): Xaa is any amino acid
GRAGTTTAYNTGANISDNTGWYEANSGGKTHPVGQKPPNAWGLYDMHGNVWEWCWDIYSAYSRGAQTDPVAGGIELYGNSGNRVYRGGNWGDTASDVRSACRGNTIHSHRRAVPPDGMSRFFSGGAPSVPIGYYDLISSGVSFGFRLVRS

SEQ ID NO: 107015 - protein, 220 aa, Unknown
  Obtained from environmental sample
  DOMAIN (15)...(218): C-5 cytosine-specific DNA methylase
  misc_feature (1)..(220): Xaa is any amino acid
MKMPPEPAQIRTSPFRAIEFFSGVGGWRYALGEMGNVVAAYDISEVANAAYSHNFGDSPIVRELATIGAKEIISLGANVWLMSPPCQPFCRMGESGGLEDTRSAAFLRLMDLLTEIRPEHFVLENVEGFLESDAHALLAQRLDEAGLNWRSFYLCPMQFGIPNRRPRVYVVASVNGILDATPPSIEPIALCNYLDSEADGDEGLYLAKEEVARHGPGLDI

SEQ ID NO: 107016 - protein, 269 aa, Unknown
  Obtained from environmental sample
  DOMAIN (1)...(269): PEP-utilising enzyme, TIM barrel domain
  misc_feature (1)..(269): Xaa is any amino acid
MAGKEVTIRLLDSPLHEFMPHNEDELAGYMAYVSKGKKTKPNKAEILAQIDALHEFNPMLGHRGCRIAVSYPEIYAMQIKAIFEAAYKLRAEGIDARPEIMIPIVMNASELKLIAFGKKIEGANYKGVVDIEDELRAEKKAKPVEYKIGTMIELPAAALGAAEIAKYGSFFSFGTNDLTQTTLGISRDDFTAFMPDYTLFDLIQGNPFSTLDSRVKELIALATARGRLTRPDLVCGLCGEHGANPGNVKFCMEAGLNYVSCSPYSVPIA

SEQ ID NO: 107017 - protein, 250 aa, Unknown
  Obtained from environmental sample
  misc_feature (1)..(250): Xaa is any amino acid
ALVSWLVREDLKLSAEGNNFEVNRRAAMEAEQTLEKARLLSLAFWRLIGLAESGGAIQEEANYFFTQNQRIAALFYTTRASGAWKNRVFVNGNYFLSRGMDGALADAYCAFNAKALESAAMGQTTLLNASSWFSNAQVSPCLAAIFFPIQGGGGGACVLFSSDDLNESFGMGVNTSYLINADGDIIADADMGRVKNQVNLGEQEIIGRILEGQDRNKQMLAELDGARHYLAYTRLNTAGSVIITTIEYEK

SEQ ID NO: 107018 - protein, 278 aa, Unknown
  Obtained from environmental sample
  DOMAIN (2)...(278): Pyruvate phosphate dikinase, PEP/pyruvate binding domain
  misc_feature (1)..(278): Xaa is any amino acid
MYAPLYNQAGKKLPPEVVQQIREALDWLEKNQGCKLGDPQNPLLISVRSGARDSMPGMMDTVLNLGLNDKSVEGLAKASNNPRFAYDSYRRFIMMYSDVVLDVHKDHFEEKIEALKHKTGKKLDTEITADEWKALCAEFKAIVKEKLGQDFPQDPWEQLLGGVRAVFNSWDTERAIIYRRMNRIPDEWGTAVNVQTMVFGNMGNDCGTGVAFTRDPGTGESYFYGEYLIDAQGEDVVAGVRTPQPITKYQATGSGLKSLEEEMPNVYKELFETCQKLE

SEQ ID NO: 107019 - protein, 279 aa, Unknown
  Obtained from environmental sample
  misc_feature (1)..(279): Xaa is any amino acid
LENVTSVPTPGLYKGEVKIGTQNLAASLDYISKNAVSGDNFSIVLGANESSPPNALNYSGKTVGITLIGYGDERTITLTSNGSLFTVNSGVTLTLDENITIKGLSENSNSLLYINNGKLIIDTGAKITGNNNYTSATASGGGVYMTGANARLTINGGEISGNTANTSSGNCRGGGVYVNSGTFVMNGGEIAGNTANGNGTASGGGGGVFVSTTGNFTMNGGAILGNTATSSFGTRQSYGGGLYLFGTFTMNGGAISGNTAPSGYGGGVETFGIFIMHGG

SEQ ID NO: 107020 - protein, 174 aa, Unknown
  Obtained from environmental sample
  DOMAIN (24)...(168): TruB family pseudouridylate synthase (N terminal domain)
  misc_feature (1)..(174): Xaa is any amino acid
MPSAFVLIDKPPGITSFKALNAIKKQLGTKRVGHAGTLDMSASGLIVAAAEKCTRLLPYVEAQDKVYTFDLHLGILTDTLEPTGNILKQDDKAARTAEELNAVLQTFIGEIEQIPPAYSAIKIDGKRASDLALKGNDIELKPRKITIYELKLCSGYQLYCKCSKGTYIRSLARE

SEQ ID NO: 107021 - protein, 69 aa, Unknown
  Obtained from environmental sample
  DOMAIN (4)...(61): Nitrogen regulatory protein P-II
  misc_feature (1)..(69): Xaa is any amino acid
NAENAYDGASFYAKKWIEIYVRDEDKDRLIQTIFEANDTGQAGDGMVFVLPAADAVRLRTGETGENALM

SEQ ID NO: 107022 - protein, 186 aa, Unknown
  Obtained from environmental sample
  misc_feature (1)..(186): Xaa is any amino acid
MKKLIAVIMCFCLIMLISCGGGKAKPIKIGVSAFPGWFVWYVVEGEGFFKKNNVDVQLVWFPVYSDSLQAFNSGKVDMLCIAMCDAIAPYEKGVGFKTVLVNDNSFGGDGLVAKNKYKTVEDLKGKTVATEYGTVTHFFLRNCLERYGMTESDVNLVNMTVQDAGPAVIAGVIDAASLWEPTLSLA

SEQ ID NO: 107023 - protein, 209 aa, Unknown
  Obtained from environmental sample
  misc_feature (1)..(209): Xaa is any amino acid
MQKIWQKTLRAGEKWSGGIGRNKFVRFRALGDDANLAALLFNLRDKTEKYNMPDTFKAQHTAHLTAGDLLLSDNGRVLAAITQDDLGWHDGITGYITRQAVDEKYGRTTYQAQRNDWLRSGEENFKVELIRNGLAPRDLTPCVNFFTKVFVQEDGSMHYAAGHCKTGAAVILKTEMDTLFILSNTPNPLNPSAVYPSAAVEIEVSDAPP

SEQ ID NO: 107024 - protein, 64 aa, Unknown
  Obtained from environmental sample
  misc_feature (1)..(64): Xaa is any amino acid
VTHDIEEAVFLANRIYVMTPRPGTIREVVPDYLPYNRSLSLKDTPEFIKLRKYINTLLPKADLV

SEQ ID NO: 107025 - protein, 290 aa, Unknown
  Obtained from environmental sample
  DOMAIN (1)...(244): RNA polymerase Rpb1, domain 1
  misc_feature (1)..(290): Xaa is any amino acid
FGPVNDWECQCGKYKRQKFKGVTCEKCGVEVTKKAVRRDRMGHIKLASPVSHVWFFKGVPSRIGYLLDLTLKDLEKVLYFETYVVISPGDTGLKKKEILSEDAYRDILEKRPEGFRAMMGAEAIKELLKQLDEDMTAEDVKEFMWALVAELGMDGKDIREILRLLLAKTDLKDKDATEMLERLDAEARMYGKDTNIKNMMLMHFLLEASAYNDDVKKILKQLDAEASMHNEDIEEIKRAMQVRLLTEVSAESVKTVVERLIENEDIKRMLKHLGAEASADSAKKPTKKAT

SEQ ID NO: 107026 - protein, 296 aa, Unknown
  Obtained from environmental sample
  DOMAIN (1)...(89): RNA polymerase Rpb1, domain 3
  misc_feature (1)..(296): Xaa is any amino acid
EQEVFECPVRSVKNEMITTTVGRIIFNRSLPDTIPFVNGLLKKEGLLSLVNRAYKFYGPETTILMLDALKDVGFLWAMKAGVSVGIDDLVVPKTKQELLRAATEEVRGIEHEYYEEGKLDASTRTNRILEVWSKAADQVASDMMKDLELQNDTGHHLNSIFIMADSGARGSKTQIRQVAGMRGLMAKPSGDIIETPIRSNFKEGLTVLEYFTSTHGARKGLADTALKTADSGYLTRKLVDVAQDVIINEDDCNTMDSIEVAAIVNSDGTIRARLRDRIMGRVAAEDVMDPYSKKTI

SEQ ID NO: 107027 - protein, 287 aa, Unknown
  Obtained from environmental sample
  misc_feature (1)..(287): Xaa is any amino acid
EVVKRYDRNSAWYKKNSMYPESVKAAEDAMRRSMLEIPTYMHAQAYELNKKGDTEGAKKKYAEAIQHYNNFIARYKSEPDWNEYKVHMNMAVIYHELGQFEKEANEFNWMVETDTTRYGRRPQNFGVLITKNDAAYNAVLAMDAAREVALKTKAGGDTAKAYSLPETKAYFKQVERYMAKFGKDTAAPVIAYNAAIIHYNAKQYKIAIEALRKLTVDFPKHKYTLLINRMTAQALLEDDQLDEAQERFEWLYKQYTDKNGQGVRDSNAVTVAKEIETSIAAVLYQRA

SEQ ID NO: 107028 - protein, 238 aa, Unknown
  Obtained from environmental sample
  DOMAIN (1)...(93): Response regulator receiver domain
  misc_feature (1)..(238): Xaa is any amino acid
GVHCDTAANGDEALDLVGRRGAYHICFVDWKMPGMDGIQLAHELKTRKASVNSFVIMISAAEWSVIEEEAKKAGVDKFMSKPLFQSTIAGIINEYIGDGERGEKPEDDTQSALDSVFTGRRILLAEDVEINREIVMALLEPTQLQIDCAESGAEAVRLFTQAPDKYDLIFMDVQMPGMDGYEATQRIRALNTPRAITIPIVAMTANVFQEDIEKCLNAGMNNHIGKPLNFDEVMEKSA

SEQ ID NO: 107029 - protein, 170 aa, Unknown
  Obtained from environmental sample
  DOMAIN (1)...(170): Sec-independent protein translocase protein (TatC)
  misc_feature (1)..(170): Xaa is any amino acid
VRPLRLGGHNANLIYTAPAEAVALSVKVALVSGLVAASPYLFWEAWRFVSPGLYKKERAVILPVVLASTLCFLLGIAFCYYTLPMVLKFLTGFAAGQVDPYFKVDEYLGFLTTMCLAFGAAFELPVAAFVLAKMGVIDHRFLIRYARYAVVAIFVVAAVLTPPDVLSQIL

SEQ ID NO: 107030 - protein, 60 aa, Unknown
  Obtained from environmental sample
  DOMAIN (1)...(60): Hsp20/alpha crystallin family
  misc_feature (1)..(60): Xaa is any amino acid
EERSNGKYHLTERTYGRFYRSFALPDDVDAEKIEAKVSNGVLEISLPKNQKALPVEIKIK

SEQ ID NO: 107031 - protein, 74 aa, Unknown
  Obtained from environmental sample
  misc_feature (1)..(74): Xaa is any amino acid
MRLPSDLASRLGKLAEATGRTKSFLVLQAIQDFVEREAWQVAEITQGLREADAGDFATEEEMADMDAKWGHRAR

SEQ ID NO: 107032 - protein, 161 aa, Unknown
  Obtained from environmental sample
  DOMAIN (1)...(136): UDP-galactopyranose mutase
  misc_feature (1)..(161): Xaa is any amino acid
LGTPVAEAGAAARAAIHTGTIDGYFDYRLGALPYRSLDFDFQHYAQPRHLPNAVLNYPDAATPWTRITEYKQLTGQEHPRTSVSVEYPRPHEPGRTIPYYPVFTGDAARLYAEYRALAEREAPEVIFAGRLGAFRYLNMDDAVLAGMEAARQILDRFAGAG

SEQ ID NO: 107033 - protein, 99 aa, Unknown
  Obtained from environmental sample
  DOMAIN (2)...(27): Bacterial regulatory proteins, lacI family
  misc_feature (1)..(99): Xaa is any amino acid
MITAKEIASKFGVSAATVSMALNNRPGISKETRKKILAFAKEMGYRKQLHPSHIQPKTLNLVIYKKHGDVVSDTPFFTELTQGIEQQTRKSGFNLLISY

SEQ ID NO: 107034 - protein, 245 aa, Unknown
  Obtained from environmental sample
  misc_feature (1)..(245): Xaa is any amino acid
GDKTYSYSFAVSGLTDGSHSLVITAIGASDQSKTAVKNFTVDKQAPTVRFTSPSAGVTPTKLFRPSGDLSNNGKYDIVWSGTWVTGQVKISGTSEDTNGVQEIYYHLGRLNDDAEATDSAREGLYNASNTWTNTNLHTETPIPGWSGGLYFWNFTESLNGYQSNELIREKTESYLPIPITSTIDNRFYLPLYVKAVDRAGNIRIVQYKIYVDPDMDYPVPLITTPDADAKVGGAVRISGTANDNN

SEQ ID NO: 107035 - protein, 209 aa, Unknown
  Obtained from environmental sample
  misc_feature (1)..(209): Xaa is any amino acid
FRLTPLDYSYFAIVYDSEKIKPVPKSLEELTDPKYAGSLILIDPRTSSPGLGFFIWVKEVYGPAWRGYWERLKPSILTIAEGWSTAYGLFTSGEAPMVLSYTTSPGYHLEYENSERYKAAIFQDGHILQIEAAGLLKNAKNSYNAKLFLDFMLDPDFQNIVPLTNWMYTVTDIPLPDSFRVNPKSDKPLKGSPATEVELNEWATLMLNN

SEQ ID NO: 107036 - protein, 221 aa, Unknown
  Obtained from environmental sample
  misc_feature (1)..(221): Xaa is any amino acid
MDEDNSKIRILIIAAVIIAIVALLIFAVTRKEQDFSAKYAGFDLRGASTGRTNTYSRYMERYIDAPAGNRDIPINLFAWTSAQGVSTLDNFENEARVLRTEEISFVEYTIDVEQAGLYFIQMEYFPVESRGIAIERALSINGEIPFLGADRLSFQRVWGDSSNGRFDNQGNEIRSSQVEKPRWEKAWFRDSLGYFAEPYSFYLRQGVNTIRLTGINEPVVI

SEQ ID NO: 107037 - protein, 274 aa, Unknown
  Obtained from environmental sample
  DOMAIN (178)...(247): PEGA domain
  misc_feature (1)..(274): Xaa is any amino acid
SAPKVQEPLDDFGSDDDNVFKAKKKGSPVAAIAAVLVLLALAGGGYYFFVIMGGKLGGDESSVSEVASTDVQSGPSVGSEPDASNIPVTTIEVDVPKPMGYTPGGKPSKPEKPEKPDKQDKKQDAKPDPKQKSAPSYASTPSYSSPSYSDPAPSYSPPPPPPPPPEPEPAPPPPPPKVEQVVITSSPSGATVEVDGKRVGTTPHTLNRPPWGDITIAVSMSGYEKATKTVEFEGGTLPVSFTLSKASSAAPPPSAPTPPPAAASGGGGASIFIA

SEQ ID NO: 107038 - protein, 263 aa, Unknown
  Obtained from environmental sample
  DOMAIN (1)...(263): Citrate synthase
  misc_feature (1)..(263): Xaa is any amino acid
NFAEDVIMRAPSRDIMNKLASSILALYPYDEAPEDPSPENTLRQCISLIARFPTIVAYSYMSKKHYFDSESLVIHLSDPSCSTAETLLSLIRPDQKYTSYEAQLLDLALVLHAEHGGGNNSTFAVHVVSSADTDTYSTIAAAIGSLKGFKHGGANAKVIGMMNDIMQNVKNWESEEEVSAYLEKILKGEAYDGSKLIYGQGHAVYTVTDPRAILLRDKAEALAEEKGLMKEFNLYRLIERLVPIVFNKVKGSDKDICTNVDFY

SEQ ID NO: 107039 - protein, 260 aa, Unknown
  Obtained from environmental sample
  misc_feature (1)..(260): Xaa is any amino acid
VDGKSGRSIETVKLWRNLNETGKPRGVFITKLDNDQADFNRTLADIKEKFKVDAVPFSLPMGSGGGYKGVVDILHEKAYFMQGDALEKEEAVPDEFKNAVAAAREKLVEAAAEGDDNLMEQYIEKGSLSPEEMKKGLVQALAQNKYVPAFAGCPLNNSGLFPLIDFIVDAAPNPRTANDTVIDSEGNETPVPIDPDKPMAALVIRTNYDQFSGKLSWLKVINGKLSADSEALNVTDNKKERIGKLYTCQGKKLEEVRELF

SEQ ID NO: 107040 - protein, 211 aa, Unknown
  Obtained from environmental sample
  DOMAIN (120)...(211): RadC, DNA repair protein
  misc_feature (1)..(211): Xaa is any amino acid
MPYIGMDYCYEKGLKKAPGNGGPEACVGPLSRQKEDRPREKLMRLGPQSLSDEELLSIVLASGIRGKNVSLLARELLSKLEAEKELPTAGELCRLSGLGEAKACTVSAMLEFGRRKWASGQRVRHPEDIYDIIRHHASRSQEKFLSISLNGAHEVLAVRIVTIGLVNRTIIHPREVLADPIQDRASSIVVAHNHPSGNLQPSMEDRRVTQR

SEQ ID NO: 107041 - protein, 98 aa, Unknown
  Obtained from environmental sample
  misc_feature (1)..(98): Xaa is any amino acid
LYPNSIGDLFDYPYAWWNSIFEYKPFNDYKEINIPVLFIHGELDVNVPVESTKYIQDNLQNKLFEYLIYPDADHNSFMYSEKTFYDLVTKSREWLNKL

SEQ ID NO: 107042 - protein, 213 aa, Unknown
  Obtained from environmental sample
  misc_feature (1)..(213): Xaa is any amino acid
MNDKAIKLLEFDEIRSKVAELALSEESGRIILGEEPLSDKEEVQKLKSLVGAVMKRMFCAGGESRESLPELKEIISKLEVNGASLEMDEAYAVGIFINRAETFRQWLLKPFRISEGGEILRDDPLTETTRNLPPCGDIAKEVFKILDLEGNLRDLPEFKELRRRIRSLQKSIETTASRYAGSDEKRRMLQSEIPSQRDGRMVLAVKANFRGRI

SEQ ID NO: 107043 - protein, 287 aa, Unknown
  Obtained from environmental sample
  misc_feature (1)..(287): Xaa is any amino acid
KDSGIVTAVFERTGGTVDNPDPIDKIEVGGVAAPATGANPTPAIDQTQYSGSIAWSPAVAAGGTFAPETAYTAVITLTPKTGFTFDGAPTGGWTIYGTDAVVSFVKKGDQGEVTAVFPATGALPKGDPITISNIEIEPFPVTGGDPKSSRIKATAQFTGTISWASTDIGTADPYKDLFKESTRPVATISILPNPGYSLEGVAENFFTVNGLPVEKDGNGKQTSPTNAANTGVVIFTVPQLASTVILGRTVNGSPLISSDVNNPNNFITGIDAPVLDPTVSAAAAVAN

SEQ ID NO: 107044 - protein, 188 aa, Unknown
  Obtained from environmental sample
  misc_feature (1)..(188): Xaa is any amino acid
MDNKEKRAEKFYSSFLTYTESLFEGFTVKNELDLETIQKMIKMSYEFVRRDRNHIVYAMQTAKPYKNPHVSHSVRTSIVALIIGTYLKLPRHQLIELGIAGLLCNISVLNMSERIYTNKEGGPNLLKFGTDMEKKLLYVHPIHANRTLKALNFPLSICEAVLQHHELEDGSGFPQQLKGNAIDLYGKI

SEQ ID NO: 107045 - protein, 149 aa, Unknown
  Obtained from environmental sample
  DOMAIN (1)...(146): ABC transporter
  misc_feature (1)..(149): Xaa is any amino acid
MKILDGIETPSEGKIRINGNDVIIASPLAARKFGIGMVHQNFMLFPEYTVAENIVMGMEPHKWGFLFDSAQAREKAAEVIDTHHFSITPDTPVKNLSIGEMQQVEICRLLYRNTDIIILDEPSSVLTDHETAALFKTMKTFGGRPGNPF

SEQ ID NO: 107046 - protein, 79 aa, Unknown
  Obtained from environmental sample
  misc_feature (1)..(79): Xaa is any amino acid
MRVIPWILELLRGVLSAKFFNNAANLFGYVTFRAAVAAATAFVLCLMLGPWLIRTLTRLHVGQHIREEGPAGHQVKSGT

SEQ ID NO: 107047 - protein, 246 aa, Unknown
  Obtained from environmental sample
  DOMAIN (26)...(93): His Kinase A (phosphoacceptor) domain
  misc_feature (1)..(246): Xaa is any amino acid
MGLPQKPPGIVMVLGDISRLVKLEQIRKDFAANVAHELRTPIHVIQGFAENILDSSLDDQDQIHHFAEIIKKNAQSMYNITRDLLTLVSLESGDAERPPLEEVVLDSVIYEALDSVSIAAKNKNIIIDVSCPPNFSARLYSSLFIQALFNLLDNSIKYSGNGSSIQVRAFQEKDQTVIEVKDSGIGIPSEHLERIFERFYRVDRSRSREAGGTGLGLSIVRHIALLHGGTVEAESHAGEGSVFRLK

SEQ ID NO: 107048 - protein, 232 aa, Unknown
  Obtained from environmental sample
  DOMAIN (34)...(232): Methylmalonyl-CoA mutase
  misc_feature (1)..(232): Xaa is any amino acid
MIPDFSKAEMQTSVAQKGRVDWEKRAGDVSNLAWTTNEQIAVRPYYSADDVSSAEHLPYLAGIPPFLRGPYASMYVIRPWTVRQYAGFSTAEESNAFYRRNLAAGQKGLSVAFDLATHRGYDSDHERVVGDVGKAGVAIDSILDMEILFDQIPLDKMSVSMTMNGAVLPVMAFYIVAGLEQGVKLEQLSGTIQNDILKEFMVRNTYIYPPKPSMRIIADIIAYTAKNMPKFN

SEQ ID NO: 107049 - protein, 232 aa, Unknown
  Obtained from environmental sample
  misc_feature (1)..(232): Xaa is any amino acid
MAGQKSDGTQGLLAEFPVPSMDDWKGEVTRLLKGAPFDKKMLTATYEGITLQPMYTAEDTKGLPFIGTSPGEWPYLRGTEALGKRPGGWLVAQELPFAEPRDFNEAVRHDLERGQNAVTVLLDAAGYRGLDADQAETWMVGRDGTSISAFADAAAALDGIPAGTPMLVIGGAGSIPAAALVVAALKAKGADFSTLNLTLGNDPLGFLAGNGELPMSIDEAFDAAASLTNWAV

SEQ ID NO: 107050 - protein, 206 aa, Unknown
  Obtained from environmental sample
  DOMAIN (83)...(193): Pyridine nucleotide-disulphide oxidoreductase
  misc_feature (1)..(206): Xaa is any amino acid
SKTWGVEIVCNTIIGKTLTVDELMDEHGFSAVFIGSGAGLPRFMHIPGEDLNGVFAANDFLTRINLMKAYVEGSSTPIQRAKKTAVIGGGNVAMDSARCAKRLGSDVTIVYRRTEKELPARVEEVRNAKEEGIHFMFLTEPVKIAGDERGWVKMLICEKMTLGKPDASGRAGTIPIPGSEIDIAVDSVIMAIGTSPNPLIRNSTKG

SEQ ID NO: 107051 - protein, 62 aa, Unknown
  Obtained from environmental sample
  misc_feature (1)..(62): Xaa is any amino acid
MKTTLAKGQIIESGFEVLDVRELSEFGAVAIWAKHQKSGAEVFHVYNDDSENLFSFNLLPPR

SEQ ID NO: 107052 - protein, 95 aa, Unknown
  Obtained from environmental sample
  DOMAIN (8)...(84): Uncharacterised ACR, YggU family COG1872
  misc_feature (1)..(95): Xaa is any amino acid
MNNCFRTDGDKIRLEIKAVPGASKTEFAGVKDGRLRIRLAAAPEEGKANTELLNFLSKTLGCPKRDLRFLSGEKSRLKTIALPLERKAQLEEIID

SEQ ID NO: 107053 - protein, 79 aa, Unknown
  Obtained from environmental sample
  misc_feature (1)..(79): Xaa is any amino acid
LEWPVETMHWLLDVHFDEDFCRVGERNVQQNLNIVRKVALNTIKGYKNKTACKRPISKLMFDCLLESENILSVLAVNEN

SEQ ID NO: 107054 - protein, 163 aa, Unknown
  Obtained from environmental sample
  DOMAIN (11)...(162): Radical SAM superfamily
  misc_feature (1)..(163): Xaa is any amino acid
MLDFPGKVSAVVFTQGCNFLCPYCHNPDLVHSGQETHSLPEVLDFLTRRRKVLEGVVISGGEPTLHDELFGFCDTLKSLGYAVKLDTNGSRPEMLRRLIRAKLLDYIAMDVKADPEHYPAAICLQDKGKDIPHSMALLEDARIAHEFRVPCVAPFIDMDSFTA

SEQ ID NO: 107055 - protein, 265 aa, Unknown
  Obtained from environmental sample
  misc_feature (1)..(265): Xaa is any amino acid
VTLTPEYYEETLKIGNKTYGVVTIKDRKWMAENLDYDTLNGTGSRCYENKLDSCAKYGRLYTWTTAMKIDKSHTSETWKGFDFPHQGICPDGWHLPNKAELDTLTAFAGGASIAGGVLKTKSGWFQRYNQSVTGNGTDGLGFSGLPGGYWDVRRTDDLSSRGVGETGNWWASTTGNNGPYGLGMVLANAASTVNSVDNNTYGYSVRCVAYLKENFDVTVVGGSGGGAYKPGETVTVTAGAAPAGLEFGRWTTDGIGVVFDDAQSL

SEQ ID NO: 107056 - protein, 57 aa, Unknown
  Obtained from environmental sample
  misc_feature (1)..(57): Xaa is any amino acid
NFCEKLAEKVGVGAVPGSSFFREDVNSLIRFHFAKKNDTLYEALNRLEKMKDRMRKQ

SEQ ID NO: 107057 - protein, 146 aa, Unknown
  Obtained from environmental sample
  DOMAIN (9)...(105): Flagellar hook-associated protein 2 C-terminus
  misc_feature (1)..(146): Xaa is any amino acid
MAMSFDGIASGLPTDQMIKAIMSQEAAPLTRLQNKQDSNNLRKAALSSIKSSLMSVATAITSLKSTALSKRSVSSSDSTVATATATGAANGTYDLKVTQLATKAKLETTSFLSSTSDSVGAAGESFTVTGKKGTATITASGNMTLA

SEQ ID NO: 107058 - protein, 86 aa, Unknown
  Obtained from environmental sample
  DOMAIN (1)...(85): FlaG protein
  misc_feature (1)..(86): Xaa is any amino acid
AERQPFSKEETQKAAESFMQYVDNLPGEMKFAVDHDTNRQIFKIVNPVTQEVVKQFPPDEFLTMIKRLKEIGPQSKDNGIFLDEKS

SEQ ID NO: 107059 - protein, 212 aa, Unknown
  Obtained from environmental sample
  DOMAIN (33)...(212): Glycosyl hydrolases family 31
  misc_feature (1)..(212): Xaa is any amino acid
VFVNNPGRVSFEIASEAVSAVQFSVAGEILDYYIIAGTDLKDVIRNYTSLCGRPALPPAWSFGLWLSTSFTTDYDEKTVTRFIDGMTERKIPLSVFHFDCFWMKAFQWVDFKWDRDQFPDPPAMLDRLKKKGLKICVWINPYIAQKSCLFDEGMEKGFLVKKANGDVWQCDLWQAGMALVDFTNPEATAWYQGKLKELLDMGVDTFKTGFGE

SEQ ID NO: 107060 - protein, 274 aa, Unknown
  Obtained from environmental sample
  DOMAIN (184)...(214): Putative Fe-S cluster
  misc_feature (1)..(274): Xaa is any amino acid
VKKHLKAQKIDLSSFPEVEYISPNPERAAGFSTPGGLMDTAERFVPGISRKIHKIEGIHTIYQYLVELSELLHTDVELSPLVDCLNCEKGCNGGPGTGNHNKPLPVLENPIRKRKAKLEGQLKPQKGDAGIKKYNQNLEKYWKKNLYNRTYKDLSGNNALKTPNEEELKAVFKRLKKYEKKDIYNCTSCGYQSCELMAKAIFNNLNKPENCAHYNIELLKEQTKTEELNRLLKEHINRTTGLIERISQTVHDLNETIEMQAQSVKESSQKTASM

SEQ ID NO: 107061 - protein, 186 aa, Unknown
  Obtained from environmental sample
  DOMAIN (1)...(185): Carbon starvation protein CstA
  misc_feature (1)..(186): Xaa is any amino acid
MSGIVILLISIVVLVVGYVTYGSWLAKKWGVDPSRKTPAHELKDGVDYMPAKAPVLLGHHFSSIAGAGPINGPIQAAVFGWVPVLLWILIGGVFFGAVHDFGSLFASIRHKGQSIGAVISENMGKRAKRLFIIFSYLTLLLVVAAFASIVAGTFNGTTADAVQNTTNGTAAMISVLFILIAIVFGF

SEQ ID NO: 107062 - protein, 111 aa, Unknown
  Obtained from environmental sample
  misc_feature (1)..(111): Xaa is any amino acid
VRWAAANGIIFDYNGDGIFAPDRKITREEAATAFFNYERLSGLIPPDFLLEMIPDDVDEISVWAKEAAKKLMMQMIFRGSGGSFNSFIPKGEIRRIEFAGMLRDYCEYSSR

SEQ ID NO: 107063 - protein, 260 aa, Unknown
  Obtained from environmental sample
  DOMAIN (139)...(252): Transketolase, C-terminal domain
  misc_feature (1)..(260): Xaa is any amino acid
EKYPERFFDVGIAEEHAVTFAAGLAAGGLKPVTAIYSTFLQRAYDQIMHDVALQKLPLFLAVDRAGLVGSDGPTHHGVFDLSFLRTIPGLVLAAPRDANELKDLLKLGLNSQQLFALRYPRGKACFAGGERDARDVRLGRAEIVCGQSGAKTAVWAIGTMVDQARQALDLLSPEVRQNICLVNARFAAPLDKELLRETARHAKKIITVEENSIRGGFGAAVAETLAELKISVPQIFCGIPDTFVGQGTIEQLIRTADWTP

SEQ ID NO: 107064 - protein, 65 aa, Unknown
  Obtained from environmental sample
  misc_feature (1)..(65): Xaa is any amino acid
MAIPAYMKIDGIPGSVNVSGREGFVEVLEFNHRVYVPTDRDDGSLTGTRKHDSLVLHKALTNRPR

SEQ ID NO: 107065 - protein, 273 aa, Unknown
  Obtained from environmental sample
  misc_feature (1)..(273): Xaa is any amino acid
EHNARFETIVKKIESLFVQPDVSITDIRTELNNLKNLLPDYAKVSSSKLARKAAEYQEKIDKKDREEETVGKAYKEEYEKIQELINLKKYISASGAVMALKNKYPKYNLSKTDALSAAISSVVSQVKQRADKAKTFTAQNNEEAAVSEIAAALDLSTDYIEANQIISKFPPKAPESVTAKIKDNSALITWVQNKPQKLATYTVIRKNGSRPTSTTDGIVVASELSINFFEDKTIVSDTPYYYAVFSSRLGINSQVVFTTTSVITYFDITNIRQ

SEQ ID NO: 107066 - protein, 232 aa, Unknown
  Obtained from environmental sample
  DOMAIN (4)...(232): Methyl-accepting chemotaxis protein (MCP) signaling domain
  misc_feature (1)..(232): Xaa is any amino acid
NACENIKENIENLNNLVAEQTERVNTSSSAVEQMTANINSVTRTLIENSKNVSDLAKASEIGKTGLQTVAQEIEGIARDSEGLLEINAVMDNIAGQTNLLSMNAAIEAAHAGEAGKGFAVVADEIRKLAESSSEQSKTTAGMLKKIKSSIDSITASSNEVLARFEAIDSGVRTVSEHEEIIRNAMEEQEAGGKQILDAVGRLKDITVEVHRGAEEMASSGDEMIKRTHNFIK

SEQ ID NO: 107067 - protein, 146 aa, Unknown
  Obtained from environmental sample
  misc_feature (1)..(146): Xaa is any amino acid
KEPGVVRFGRSFRPGDRVMQLKNNYNREVFNGDGGLVERIDLEAQELTVNFEGRPVVYDFSELDELTLAYAITIHKSQGSEFPAVIMPLTNSHHIMLRRNLLYTGLTRGRRLVILIGSARALEAAVANNREHIRRSNLARKLTAAR

SEQ ID NO: 107068 - protein, 150 aa, Unknown
  Obtained from environmental sample
  DOMAIN (60)...(140): HRDC domain
  misc_feature (1)..(150): Xaa is any amino acid
SVTDELNVFLRSHRIVNVEKRLIDGERGTGWVFLVEYGNDGGKNTSNAQSQRVDYREALNPAEYALYDKLRGLRKELADKSGIPVYAVFTNDQLANMVRKPPQTAKDLLSISGIGESRVKQYGEAFVNLFLSEQQTPEEQGKSEKAELPF

SEQ ID NO: 107069 - protein, 279 aa, Unknown
  Obtained from environmental sample
  misc_feature (1)..(279): Xaa is any amino acid
GAVTDATSNTTGTTAVAGTDYTTVLGSVPTGYPFATTAIVQTVTFKTTAPRINQNIVGYVPKTGDTVVTTIADNSFLASVAWAPSSGSAPKAGDKFAHDTTYTATITISQQLPAPAPNTDQLYSLFGVPANGFFKFFYDSTAEGQDKPTAVTNPINDAGGKVFRVTFPKTDTTIGTVTAVQTIKGIAVPTTTGTPTSKAAAVAANSNAAYEVDNLTWATAAGSAMGDGAKFIANTAYTATITLKPKDGYTFTGTTANWFKVENAPTTPATLGVSHDAGG

SEQ ID NO: 107070 - protein, 250 aa, Unknown
  Obtained from environmental sample
  DOMAIN (1)...(159): ATPase family associated with various cellular activities (AAA)
  misc_feature (1)..(250): Xaa is any amino acid
DFKVTSAPALEKPKDLAGILTTLSEKSVFFIDEIHRLKPAIEEMLYIAMEDYELDWIIGQGPSARTIRIPVQPFTLVGATTKAGNVSSPLISRFGITFRFSFYENEDMEAIVRRSAGILGVAINDDAASLLARSARGTPRVVNRLLRRVRDFAQIKAKGAELLVTREIVEESLKRLEIDSLGLEKYDREILKIIITRYGGGPVGAETLAISIGESVDTLEDYYEPYLIQAGLIQRTPRGRVVTALAYEYL

SEQ ID NO: 107071 - protein, 189 aa, Unknown
  Obtained from environmental sample
  misc_feature (1)..(189): Xaa is any amino acid
MQNPGTTDEDELVSAGVAIASASKLGTIATLRKGFQITPEIAKGLWLTILLAVIASLGRTVVPMTVQRVVDEGILAVGGPNYHVALRLAATAFGILIVSAICSSAMNFRLIARTEAGLATLRIKAFRHIHDMSVLTQNTERRGALVSRVTSDVDSISQFMQWGGIQLVVLSLQLLVSSILMLSFSVRLT

SEQ ID NO: 107072 - protein, 203 aa, Unknown
  Obtained from environmental sample
  DOMAIN (1)...(188): Cytochrome C biogenesis protein transmembrane region
  misc_feature (1)..(203): Xaa is any amino acid
ILGGLGIERETNKNRLIFSAAGFALGFSAVFIALGILVSKTFLLMGGISVYINWAAGIIVIVLGLNVIFNFIKFVNYEKRPFLQKWMKKGIRGMLAAFLAGTAFGAGWTPCIGPILTSVLLIAAQDGKTGTAVFYLAVYSAGLAMPFLLAALFLDFFLKRGPALRKHLPLIRRVSGILLIIIGLMILAGKYSALNILHSRATF

SEQ ID NO: 107073 - protein, 269 aa, Unknown
  Obtained from environmental sample
  misc_feature (1)..(269): Xaa is any amino acid
FPVGEFKSVEYVRRHRDAIVRSIVMQWMRHRLRAHLADAEDAEFLRAVKADEPNLPAWAVRALSEGKPVHEFVPSRMPLRLAGDIASLRDFLYSAANSYVGKTLQAAQDNQAAPRLRISYLKEVNEYATFELAMQECRKWHASMEVKGKDERLYQAALAGTKTEMELGDEMTMVRLLTPEALDYEGGRMGHCVGDDDYDEGVKKGTLIIYSLRDKSGEPHATLQVSKDGRLLQCKGKQNVEVVRQYHPYLREFILARGLKPEDIMAGDL

SEQ ID NO: 107074 - protein, 285 aa, Unknown
  Obtained from environmental sample
  misc_feature (1)..(285): Xaa is any amino acid
YRSDDKGENWRQVSETSDRTANICGTYGWVFGQVRVDPTDENKVYGMGVPLVVSSDSGKTWANVGGGLHADHHDLWIDPTNPNYMVEGNDGGLYISYDRGRSWKHQVNIAVCQFFDVAVDTDSVMRIYGSMQDHGSFRGTLDISRGRNRVRPVEFSSTVGWEGGNHTIDPTDPRITYGASFYGELNRWIYDAANINAISTKVITPKAKEGELPLRGQWMAPFQLNAQNPLIIYHGSQYVHRSLDKGETCERISPDLTYNDIKTMGDIPYHTLFTLSESPFEFGLI

SEQ ID NO: 107075 - protein, 240 aa, Unknown
  Obtained from environmental sample
  DOMAIN (175)...(239): GTPase of unknown function
  misc_feature (1)..(240): Xaa is any amino acid
MKRASYRGLVKTLELEIAGQEVVKVRERNPKFGMGSGKAGEITEKAKELEVDCLVFDWDASPSQQRNWEDLAGIPVIDRQELIINIFAMRAVTREADLQVRLAELHYRLPRLTHKYIDLSRQRGGRYGTRGAGETKLETDRREIQKRIHKLEKEIEDVAKQRQVQRRQRERQGTPVCAIVGYTNAGKSSLFNALSGSAVLVENKLFATLDATTRRFEPTPGMGALLTDTVGFIRRLPHNL

SEQ ID NO: 107076 - protein, 263 aa, Unknown
  Obtained from environmental sample
  misc_feature (1)..(263): Xaa is any amino acid
VDNYKKALHRYINKGLFANVKEIWEKLLLYCPEDIHFFLHVQKKVAKNISEERAIDLLKAVYSFCKDQDIDMAIAILKIVLQYDEKDYPARKEIVECYKKKYAGHSQLEDYIRISNLSQSYRNVHEAITDFEKHIAFDKGNYVFHRTWGVGRIVEIQGDEIKIDFAKKRGHTMSLKMAVEALQTLAKDHIWVLKATWKKEKLLEKVKGDIPWALQTIIKSFGNSCDTKRIKAELCPGVLSEKEWSSWNTKARDILKSDAGFGV

SEQ ID NO: 107077 - protein, 119 aa, Unknown
  Obtained from environmental sample
  misc_feature (1)..(119): Xaa is any amino acid
VFWGLAVASGNIGGRVVVLIFLILIMAGGGLLWLDFLNVIDAKNTIGPIIEFLRPLPVIGRLMPSGAGRTQPLFPDDGDLNLDAERFAIRMEALELRNQEMDKQEQEMQSWMGQIEPMA

SEQ ID NO: 107078 - protein, 261 aa, Unknown
  Obtained from environmental sample
  DOMAIN (57)...(198): Flagellar hook-length control protein
  misc_feature (1)..(261): Xaa is any amino acid
LAEKAGSGLVSQGAGRENAPASETRGRKSKERLNIEVRDLRTGEGQKEALAQAGNTVSLKEAIESNLRSLSKAEIEIPVELDLNKGSVDGKAGDSTLNRSFEDALAAQLRGNLSADIVRDAAVIVRNGGEGTIRLSLRPASLGDVKIRLELTENKISGHIIVESNEALRAFERELPVLEKAFRDSGFSETNLEMFLASENSQGEGTFGSREERQEKDFLISAIAASRYETESDQAAMSRSDVPITDERVLSASPGRIPVNL

SEQ ID NO: 107079 - protein, 259 aa, Unknown
  Obtained from environmental sample
  DOMAIN (2)...(118): Beta-ketoacyl synthase, N-terminal domain
  misc_feature (1)..(259): Xaa is any amino acid
MLPLTVPMMIPNEAAGNISMMFGTRGPAFTQVTACASGTDALGQALDVIRAGRCDVVIAGGTEATILPFAVGGFQMLKALSTKRCNEPTKASRPFDADRDGFVIAEGSGILILESEEHAKARGAKILAELAGYGASADAYHITAPDPTGTSGANAVKLAIADAGLKPEDIQYYNAHGTSTEINDPTETKMLKMVFGDHAYKMKVSSTKSMHGHCIAGGGGIEAIACILAIRDGFYPPTINLDNPDPECDLDYVAHKAQY

SEQ ID NO: 107080 - protein, 281 aa, Unknown
  Obtained from environmental sample
  DOMAIN (206)...(281): Response regulator receiver domain
  misc_feature (1)..(281): Xaa is any amino acid
VNDILDMSKIEENKFELSYVEFEFYAMMQRVVNIFEFRFGEKKIKFTMNLTPDLPQRIITDDQRLAQIVTNLLSNAVKFTPEGGSITLSARRLEDKEPNFCTMEIAVTDTGIGIPKEQQGKLFDSFVQVDSSISRKFGGTGLGLAICKRIVELMDGNIRMESEAGKGATFTFTFRAEIGTQASSDEGGAADGAASKTADKLDFTGKRILLVEDVEINREIVITVLQPLGLEITEAEDGQRAFDLFRTNPDAYDLIFMDIHMPGVNGYESTMLIRALTTQKR

SEQ ID NO: 107081 - protein, 80 aa, Unknown
  Obtained from environmental sample
  misc_feature (1)..(80): Xaa is any amino acid
VIRESEHDIRKSIPNSSFLIFPYSEKRRKVKMMLKETESLLANCTSGGCGAKIGPGELSTLLGKIPAVRDERLLVGFDCS

SEQ ID NO: 107082 - protein, 194 aa, Unknown
  Obtained from environmental sample
  misc_feature (1)..(194): Xaa is any amino acid
MKREKSNIKGSQLLAFFPFLSSFFSCIAVVGCGGKTSLIELLADRLRDKKVLISTTTKIYPPKMKDIALCETLRQCEEHEARTGVQCMGLLNSASGKLEALPEAFLSAIKTRYDIVLLEADGSREMPCKGWLANEPVVPDYCTHTLGVITMRALGKQAGEDTVHRLPEFFALTGIGEGQTITGEALEAMVCAPG

SEQ ID NO: 107083 - protein, 161 aa, Unknown
  Obtained from environmental sample
  misc_feature (1)..(161): Xaa is any amino acid
MAQHQPQRLRGLNLGGWLSQIDAIQEKDPEKFPGIDRHMESFITAADFANVNSWGFDHVRVPIDSYLFFTENESPVENRIANIDRAVTLSKQHGLKLILDLHECPGHDFADAADSPVQKLFSDDDAYLKKAEKIWACLSERYGSENHVLFESLNEPVAPTS

SEQ ID NO: 107084 - protein, 256 aa, Unknown
  Obtained from environmental sample
  misc_feature (1)..(256): Xaa is any amino acid
VTEAEIQQAVATGNTKAVVFSSSNSTVKLKNVRVNNGTATGNYVGRLIGAFGNVNVEGGTFTSATSPNGAAISSSDANVEIIGARITSTGSATDSGGYVVSGKKVSVKSSATDSGVVAWTGSGKAVGGVYATSDVEVSTNNGYKAEVRVAGGGVAIDVYPDVNYAANDKVVISGSAASSAFVTGGSSAQAIVVRNAGTSANWSGVWDLELYNAVVTRGTGTFNTPLIDVEGADVYVDGTALSRTRILSVGNVAIVA

SEQ ID NO: 107085 - protein, 277 aa, Unknown
  Obtained from environmental sample
  DOMAIN (1)...(277): UvrD/REP helicase
  misc_feature (1)..(277): Xaa is any amino acid
VFNVKTGIASWNSGIHAAGTSGPLASMDLKPVYDEYQNGLRVYNAVDFDDLLTLPIELFEKNPDILAKYHKRYRYIMVDEFQDTSMIQYRLLRALAIRQVDTGNLPNVCVVGDDDQSIYSWRGADYRNLLQFEKDFPQVKEIKLEQNYRSTSTILDAANGVISHNTNRKEKNLWSPVSGGKPIELVYPENESDEADFIASKIRELRFTETRKYHDFGVLTRTNSLARNIEEAFLADNIPYKVSGGTSFFQRKEIKDIISYLKVIANPQDDISLLRII

SEQ ID NO: 107086 - protein, 293 aa, Unknown
  Obtained from environmental sample
  misc_feature (1)..(293): Xaa is any amino acid
FDLIEAYYKKNPRINGQPTIPFVILTHDWRIFELWNPPNFLAGNPNDGNGIVDPRTRTYKTFFTMDISKRWFRKLNELDKRGLIDRTSFTDNYDQYSAKIASGRVLGQSVQGWQFIYGPDAANRDANGNIRTMAPLPVVWDANTRPHYRDITIPNLYRGMGISKSAKDPIRIIRFINDLLAEDVQRTLNWGIEGQHWQWRTEGGAKVPYRTEEQRKNWLSDQWQEQNRARLMEDIFPKIEGTFTDGFPSNLSFYYPEREATLLPEDRELFRAYNVVSTNELMDKNPPANAPWY

SEQ ID NO: 107087 - protein, 137 aa, Unknown
  Obtained from environmental sample
  DOMAIN (47)...(123): Ribosomal protein L6
  misc_feature (1)..(137): Xaa is any amino acid
MAGQTVRVLPAEEKSESGGALWGLSRTLVNNMVVGVSTGFTKVLEMTGVGWRAEADGQSLKLALGFSHPVVFPLPRGISVQVDAKTNRITLKGADREILGETAAKIRALRKPEPYKGKGIRYEGERIIRKVGKAGGK

SEQ ID NO: 107088 - protein, 84 aa, Unknown
  Obtained from environmental sample
  DOMAIN (6)...(84): Ribosomal L18p/L5e family
  misc_feature (1)..(84): Xaa is any amino acid
MSKTNPRQAARVIRQARVRRKVRGTAERPRLCVFRSAAHIYAQVINDEQGVTLAAASTLSPDLRVEVKGLKKVEAAKAVGRAIA

SEQ ID NO: 107089 - protein, 247 aa, Unknown
  Obtained from environmental sample
  misc_feature (1)..(247): Xaa is any amino acid
MTLATPLKNYNDGNPLMTQAFHADPYAISYGDRVYVYGSDDTPRMSGSNILPNNYSGIVNVALVSSGDLVNWTHHPLIRAAGRNGAASWSGLSWAPAVAYKQIGGQTKFFLYIANGTNGIGVLTSDSPTGPFTDPLRRALIDRRTPGVDNVPGVPDVKWLFDPDVLVDDNGKTYIYFGGGIPSEDLSNHETLLNNYQSDEPMPGTFRVAELGEDMTSIVPGSVKPFPAPFLFEAASITRLAAYITSH

SEQ ID NO: 107090 - protein, 235 aa, Unknown
  Obtained from environmental sample
  misc_feature (1)..(235): Xaa is any amino acid
KEKVVISTATITLQQQLYEKDIPLVADAMGWSKIKAVIMKGRGNYLCLRRLDEALREPPMIIEEDDSEYDELKRINEWAQNTKTGVRSELSFQPAETVWGSVCSESDLCLSLHCPWRENCFVSAMRKEASNAHIIVVNHHLLFADLAARFQGAGYENAVVLPPFNRLVIDEAHTIENAATSFFSAEFGRAGIFRQLGRLYHKKKKSKRGLLVRLCAMLPPGSKHLNSMVKQADKI

SEQ ID NO: 107091 - protein, 221 aa, Unknown
  Obtained from environmental sample
  misc_feature (1)..(221): Xaa is any amino acid
MKKITSIVFVLGLALLASGCGKKSTLTIYTWDEMFPQEILRGFEKETGIRINYVNFDTNETMLARLQAARGGNYDLVIADDYIIELAITEGLVRKLDKSKLSNYRNINPIYQKQFYDSADEYTFPYGAGVMTIVYDPAQVRKPIAGYADLWDPALVNSVGIIGNFRVINGMALKALGYSYNTGDLGTIRSAGERLLRLAPNIRLIRDDHLEDELISGEISV

SEQ ID NO: 107092 - protein, 74 aa, Unknown
  Obtained from environmental sample
  DOMAIN (6)...(74): Phd_YefM
  misc_feature (1)..(74): Xaa is any amino acid
MTAESSAQFNIHEAKTNLSRLVDRVEHGEEIIISRAGVPVARITKYSKRVNRSARGFLRGELVLSPDWDSDEVN

SEQ ID NO: 107093 - protein, 156 aa, Unknown
  Obtained from environmental sample
  misc_feature (1)..(156): Xaa is any amino acid
MSNDSDYPTEVIATDARAARSKSKKLVAYFSATGTTKAAAQEIAQVLLADRYEIKPKVPYTEADLDWRDENSRSYVEMHDQTFRPEIVNDPVDIQAYDFILLGYPIWWGVAPTVVNTFLEANDFRGKTVIPFATAGGSDIGDFTNYLGRSLPGDRT

SEQ ID NO: 107094 - protein, 36 aa, Unknown
  Obtained from environmental sample
  misc_feature (1)..(36): Xaa is any amino acid
LDDDEDEDEDDDYDDDEDEDDDYEEDEDEEWDEDDE

SEQ ID NO: 107095 - protein, 268 aa, Unknown
  Obtained from environmental sample
  misc_feature (1)..(268): Xaa is any amino acid
KINISLLQRILVENQEAVQKIELSERELVLEAKGNYIFVGPRQAGKTFCLFQIIKQYIKKYSAKKILYINFEDDRLLTFNASHFQLLLDAYKSLFKETPILFLDEIQNIDGWEKFSRRLADSKEYKIFITGSNAKMLSKEMATTLGGRYLIKNIYPFSFSEYLAANKVRLTEHWQFSNKRYEIRRKFNDFFKFGGFPELLHFKEKRLWLENLYKKVFYGDLIARYKIRNDFALKILVSKLAESIHDEISFNRMKNIIQSIATPIGAST

SEQ ID NO: 107096 - protein, 120 aa, Unknown
  Obtained from environmental sample
  misc_feature (1)..(120): Xaa is any amino acid
MEVQATTRMTQPVANPAVQNPLAQANNAATLKTEEIQARRQEQAAQVAQANQATEANNAARTTQVNQTDQANRANQAAQRRTDEQDQRTNNNIQQDRQTARDNREAENLAANQNTYAPNP

SEQ ID NO: 107097 - protein, 94 aa, Unknown
  Obtained from environmental sample
  misc_feature (1)..(94): Xaa is any amino acid
MKFNDILKIDYLLLLPALVLLTMGILFIYSSGVTSAGIQVSDEYIKQIIWTAIGLIIALVLALVDYRRFYNLSAYIYLISLLPLLYTLFLGRVR

SEQ ID NO: 107098 - protein, 66 aa, Unknown
  Obtained from environmental sample
  misc_feature (1)..(66): Xaa is any amino acid
MDATRQMFAQKVSAYTVQKKCRVVLDTEAAVYSGQEAIDAGLADELVNSTDAITVMRDALDARKSR

SEQ ID NO: 107099 - protein, 85 aa, Unknown
  Obtained from environmental sample
  misc_feature (1)..(85): Xaa is any amino acid
MRFLEELLGGTPAENAHITRDILGGKKGPKRDAVLLNSAAAIHIARPDTSMKDALALAAQTIDSGKAQAQLEQFIKLSQAPETDA

SEQ ID NO: 107100 - protein, 86 aa, Unknown
  Obtained from environmental sample
  DOMAIN (2)...(85): Plasmid encoded toxin Txe
  misc_feature (1)..(86): Xaa is any amino acid
MWKIELTKVAQKDSKIALKSQYKDRINELLKIIKENPFKNPPHYEKLQPPRDNKYSRRINKQHRIVYEVLEDERVIKILSLWTHYE

SEQ ID NO: 107101 - protein, 267 aa, Unknown
  Obtained from environmental sample
  DOMAIN (16)...(267): Permease family
  misc_feature (1)..(267): Xaa is any amino acid
MSQYEILRPNDRPNLAKWIPLSLQHVFAMFGATILVPILTGLNPSTALFTAGTGTLIYILCTGAKVPAFLGSSFAFIPPLIAISAGYGMSAALGGAIAAGIFYCVVALIIRFTGKDWLDKALPPIVIGSVIIVIGLSLAPVAMNMAMNDADGYNLVYFSIAIVTLCITVAANIFLKGFFSTIPILVGLVSGYFFTLIMGLFIPAYAIINFQVVKDAPWFALPSFRMPSFNLVPVLTFIIVSLATICEHLGDTLVTSKIVGQDFCGIL

SEQ ID NO: 107102 - protein, 225 aa, Unknown
  Obtained from environmental sample
  DOMAIN (31)...(225): CorA-like Mg2+ transporter protein
  misc_feature (1)..(225): Xaa is any amino acid
VPVSEIVLYRDGERTAAPATIPKALDLASRDSDIAWIRIAEPTASELQGLAEQFQIHRLVLEDAINAHQRSKIERYGNMLFVVLHAARYGEASEKLQLDEIHALIGPNYAVTIRHSPFTGSTVITDRLETDPDFTKHPSLSVLHALLDTVVDEYRPIIALIEADVDQVEDELFDDQVDPSSQRIYGLLREVISFQRLAKSLRFIAAELESGRIFRPGPGEDTNAI

SEQ ID NO: 107103 - protein, 265 aa, Unknown
  Obtained from environmental sample
  DOMAIN (3)...(265): DNA polymerase III, delta subunit
  misc_feature (1)..(265): Xaa is any amino acid
DAYIFLGPELGKTLDALNAVRKKFAGAEETVFYAGETSCGAIADAIQNHSLFALTRMIIIKNAELIKKKDESELIVSCIKNLEEGTTLILLSDEIRLAPGLDDAVPKANRQVFYELFEREKTEWLRSFFKREGFTVDSGGIETILEMVENNTEAMARECSRLILFLPKDKPVNAADVEKWLSHSREESAFTLFSRIAAGDLSKALESLHTLLAAKQSSQSILLGLAWCFRKLADYLALLETGEANNFELKKIGLSAPKARDDYTA

SEQ ID NO: 107104 - protein, 158 aa, Unknown
  Obtained from environmental sample
  misc_feature (1)..(158): Xaa is any amino acid
MQQYAMNGIWELFIPRVGPGDFYKYEIIGLSGKMLPLKADPFAFRTEHPPNTACMVYGLPDFDWKDDEWMRERHNRNSHVAPVSIFEVHLGSWRRKWDGSFLTYLELADELIPYVQDLGYTHIQLMPVAEHPFYASWGYQPLGKFAPTARYGRPEDSR

SEQ ID NO: 107105 - protein, 163 aa, Unknown
  Obtained from environmental sample
  misc_feature (1)..(163): Xaa is any amino acid
VIGTQTWMAENLKVNLPYFSKCYDDLESNCDIYGRLYNWTAAGSVCPDGWHLPEAEEWLTLINYVENGDRGSVGRKLKASTGWEQENGTDDFGFSALPGGMCFSRNGFERFDGIGHRAFWWTDTRREYQIAYMVDLSSGIYREDGNLGGDFTSDYLSIRCVQD

SEQ ID NO: 107106 - protein, 267 aa, Unknown
  Obtained from environmental sample
  DOMAIN (60)...(140): Bacterial Ig-like domain (group 2)
  misc_feature (1)..(267): Xaa is any amino acid
AATRPNARVAWTSSDQSVATVSGAGPRATVAAVASGEATITVRTEDGGKTAECAVTVVIPATGLTLDKVTLKLPLGESGALAATMLPSNAHLGLTWTSSAPSVAAVSGDGLNATVKALAKGTATITATSEFGQIKASCEVAVHDDPYDTDFALKNALEAFFPKVVNKNLSEQEQAVLSDELKEIFVNAYARDSYSKHLPFSSEEIRKGLSITKLGTIYLIPQTRNIINNNNSKKGGNEQIIVSNSSKHRGRNETQKGGATMNTHRKL

SEQ ID NO: 107107 - protein, 198 aa, Unknown
  Obtained from environmental sample
  misc_feature (1)..(198): Xaa is any amino acid
MAKTESTSERLLEAATIAAVTKAPLKNVELNWPYVLVALGREGIKDFPVQVGVAATIAIETGTFMPRKEGRSKNPESRVYAAQQKYWHTGYYGRGYIQLTWERNYREVGKAIGVDLVAQPDLALEPWVSARIAAYYFKTWCVGGSDKRKLFDACMAGDWEAIRRGIMGPKYADDQRGLARFMSFCNVGSSRVDLQACK

SEQ ID NO: 107108 - protein, 190 aa, Unknown
  Obtained from environmental sample
  misc_feature (1)..(190): Xaa is any amino acid
MKPVFVNAHCHLELTNLAGKMPKNKPFFEWVSVLRKEVENWTKEDYRASYLRGLELSLKAGTSVIYDVGNQMSEPRLARIQGFTGLYSMHEIIKEPLPFPCTPHSIYATPPELVREAVKGCVKAGVPWSIHLAEFDESDRFCDFLDIFKGEQEFVRSGFIVHGNFLKESDLAFMEKNHIALVHCPESHEW

SEQ ID NO: 107109 - protein, 239 aa, Unknown
  Obtained from environmental sample
  misc_feature (1)..(239): Xaa is any amino acid
AHKKAADFWDAALKKDETRMLSEHIAFYQEQYNRVKLDLGVSKNDKAATDERLKNFRHNDDPSLAALLFNFGRYLLISSSQPGGQPANLQGIWNHQPSAPWDGKYTVNINLEMNYWPADVTNLRETCQPLFQMLKELSVTGQETAQVMYGAKGWVLHHNTDLWRSTGMVDGATWGMWPNGGAWLCQHLWQHYLYTGDRQFLKEYYLVMKGAADFFIDPLTEEPSNKWLKPRRRTRPNTV

SEQ ID NO: 107110 - protein, 66 aa, Unknown
  Obtained from environmental sample
  misc_feature (1)..(66): Xaa is any amino acid
VIDLGGTHMPAPGYVDLDSITNPEILVEGKPYPIDIFFCERLATQSNVRVSTNIYITQKPANRECF

SEQ ID NO: 107111 - protein, 84 aa, Unknown
  Obtained from environmental sample
  misc_feature (1)..(84): Xaa is any amino acid
MNNEITEKNREAWNEALGYHQKAMNKSLQEGFKDPNFSTFNRDFLIEKVKEINLQDKVIAQLPCINGHELLSLVKFGAKKGNRL

SEQ ID NO: 107112 - protein, 150 aa, Unknown
  Obtained from environmental sample
  misc_feature (1)..(150): Xaa is any amino acid
MALLLKEYSNITLNIEKVISMLLIHDIVEIDAGDTFLYSDKRNTVQKDEKKAAERIFGLLDKEQKENFLNIWNEFEERKTDEAKYAAIFDRLEPLLQNYILEGYTWKKYNITYEMIIEKNKHIQESSDVIWKFVLKLLEKAVEKGYLKYE

SEQ ID NO: 107113 - protein, 209 aa, Unknown
  Obtained from environmental sample
  DOMAIN (1)...(147): Formyl transferase
  misc_feature (1)..(209): Xaa is any amino acid
SPRGRSGRAELFECAAAAEGFASQCVVLKPEKLDSAARALVADLKPDILVSFAYGKIFGPKFLGLFPLGGINIHPSLLPKYRGPTPVPAAIINRDTETGITIQRLAAEMDIGDILVQEKLPLDGRETTASLSETIAQKAAELLPVALRGISAGTLQARVQDHSMATYCSLIEKEDWLINWKRNVLEIHAGIRAFDPWPLSWTTHGELRL

SEQ ID NO: 107114 - protein, 101 aa, Unknown
  Obtained from environmental sample
  misc_feature (1)..(101): Xaa is any amino acid
MFPLSLPVLATIGLFLSFAYWNDWFTAMLYIDNPNLYSLQAYLNRLLADINFLAQNAALLGMSHVQLMAAMPKEEARMATVVVAVLPIACASPFFQRYKNP

SEQ ID NO: 107115 - protein, 113 aa, Unknown
  Obtained from environmental sample
  misc_feature (1)..(113): Xaa is any amino acid
GACNFKTNDKIKADTFSLEISGVDSGHAELDVNSLKADISGVGRFELYGMADKAEIELAGTGELNASSLQVREASIELSGAGTVRIYCSEKLSIEASGAGMVEYKKSPSLILD

SEQ ID NO: 107116 - protein, 244 aa, Unknown
  Obtained from environmental sample
  misc_feature (1)..(244): Xaa is any amino acid
MIDIALLNAVSLNADTLDKVLAAQDEVIKAARPQDKPRLLETAATMLTAKHPKAADFPKGGVLKAVQGYRSEVLAMLNNPEISGRMPESNRNNMKNSLAALLVAALIANGDYSAALDALQENRATAQLEPGYYFSTGEALAGLKRDKDALDAYFLAAVEGHQPSIEKAKALYAKVNGGSGSEANFDADLIRRRNALPFHPPPFKAPENWQGRAVLAELFTGSECPPCVAADFAFDGLIETYPTK

SEQ ID NO: 107117 - protein, 142 aa, Unknown
  Obtained from environmental sample
  misc_feature (1)..(142): Xaa is any amino acid
MAKKEETKPAELTGPEKAAIFLLTMGEELTTEVFKELEDIEIKDLGKAMSHIQNVSADQVQDVLWEFVEALNLPSDMRFKGGDFFKSSLGRALTGERAEGLILDVNSPVPFSNIKHLDAKALGAFIRNEHPQTIALVLAHID

SEQ ID NO: 107118 - protein, 75 aa, Unknown
  Obtained from environmental sample
  misc_feature (1)..(75): Xaa is any amino acid
MRVGYEDFRKYDIETMRAEPLLYQSGYLTIKDYDEELEQYILDYPNEEVRASLSKSLLEQYLQPSGSSSSLINQQ

SEQ ID NO: 107119 - protein, 221 aa, Unknown
  Obtained from environmental sample
  misc_feature (1)..(221): Xaa is any amino acid
MRAGYGENIGKFFAENTNPELLIDFAGVKVFKSATVDTNILMFSKVKNRQKTSACVVKKDSIKDLSDFVIHNSTPCSFKTSESWVILSPIEQRIKAKIEAVGTPLKDWDIQINYGIKTGCNEAFIIDGAKKKELIRQDPKSAEIIRPILRGRDIKRYGYEFADLWLINTHNGIKEKGVKPVNINKYPAVKKHLDRYYPELKKRQDQGDTPYNLRNCAYMED

SEQ ID NO: 107120 - protein, 233 aa, Unknown
  Obtained from environmental sample
  misc_feature (1)..(233): Xaa is any amino acid
MPAVDSRGSHRFADLYARPEAGNYDPGRNLIRAPHTGSDGPLPGISASAHYPWRRELAAQYGYPLDWLTPPPGADPHDYLTGPAVQERLGKGDTAVNLAAVALAANAYLATGEKRFAAWARRYTEGWCARAAANGGIVPDNAGLDGTVGQYLGGRWYGGHYGWSWPHGLYSVLPALLIAATSTSLVAGQDQALDAVRRVIDTVLDLGKDGTLEESGSSLAAHWTDRLGPGCGP

SEQ ID NO: 107121 - protein, 258 aa, Unknown
  Obtained from environmental sample
  misc_feature (1)..(258): Xaa is any amino acid
GHLVGIADPKDIGEQYKTWNMATLPIIPEKFKLIPLPDTKTHLSQLGKLIRRKDISTIINACDAGREGELIFYYILEHEQGKTGLGDKTIKRLWVQSMTQTAIREAFEHLRSNTEMKNLQDAALSRSEADWLVGINGSRGLTAYNSRFGGFQLTPCGRVQTPTLALIVKREENRIAFVPQTFWTLTADFRDGSEHYIGKWTNQKEKENSTKIWKKEEAEAILNKCKGKQGSVSEESKQVTQKCPPLYDLTFLQREANN

SEQ ID NO: 107122 - protein, 209 aa, Unknown
  Obtained from environmental sample
  DOMAIN (27)...(195): ABC transporter
  misc_feature (1)..(209): Xaa is any amino acid
MIQINNLKKSFGLQELFSDAGFQVGRQERIGVVGRNGSGKSTLFKIILGEEGYDGGNISIPKNYSIGYLSQHLHFTHSTIFEEACSALKPNEDGWIESYKVESILSGLGFDKETIEKKSPAMLSGGFQIRLNLAKALAAEPNMLLLDEPTNYLDIVSVRWLQKFLRNWQGELMLITHDRRFMDSVCTHTLGIHRQKMRKMQGSGQNFKM

SEQ ID NO: 107123 - protein, 240 aa, Unknown
  Obtained from environmental sample
  DOMAIN (32)...(224): 7TM receptor with intracellular HD hydrolase
  misc_feature (1)..(240): Xaa is any amino acid
VQVRALFSFALCVIAIVAIIVCENMGFIEELRKIIGTVFLVFSLYAMYIILQGRTILGKELDNGERYMLASIAGAYIIGSVLIKYLTSVVDAFPISLAIPTGLWRMLFAVFMGKRTAMIMAIALPLGAYFTGAYDIYSYLIALVSGAAASTILHNESNRMSLIKAGVVIAAANCFAVVVVLLIRQANIYEYPALLFWAALNGIICGMLTLGFLPPLEHALNAVTPFRLMEKSDLNAPIYA

SEQ ID NO: 107124 - protein, 155 aa, Unknown
  Obtained from environmental sample
  DOMAIN (12)...(124): Response regulator receiver domain
  misc_feature (1)..(155): Xaa is any amino acid
MPAKPANRQPEARIVVVDDETSIRELLATSLRFAGFEVFEAENGNAALRTVAEVRPDLIVLDIMLPDQNGFTVTRRLRARGDHTPILFLTAKDDARDKVEGLTVGGDDYVTKPFSLEEVVARIRAVLRRTGGGGAVTDDILRVGDLEQDPDCGIL

SEQ ID NO: 107125 - protein, 91 aa, Unknown
  Obtained from environmental sample
  misc_feature (1)..(91): Xaa is any amino acid
ALLQAGEGWLIPGEIFHYASQGVKSFVLLQPFGCLPNHISGRGVIKKIKELHPDIQILPLDFDPDVSFANIENRLQMLIMNARSQMKVANN

SEQ ID NO: 107126 - protein, 131 aa, Unknown
  Obtained from environmental sample
  DOMAIN (1)...(108): DnaJ C terminal region
  misc_feature (1)..(131): Xaa is any amino acid
RRSGWLAPCSLEEKNDDYFVRDGQNLFCKVSVPVYRLALGGEQRVPTLYGEVKVKISAGLQPGTQLRVRGQGLPGYNSDYKGDLFVQIEAHIPENLWSKEKSLYDELSKLGSDRDERRESGLLDRIKEFFS

SEQ ID NO: 107127 - protein, 278 aa, Unknown
  Obtained from environmental sample
  misc_feature (1)..(278): Xaa is any amino acid
MGTLTQATNVLIAAKVPLQDLQAQLTKFGDLSQGNSQKMTSYINAFSQAAAKGKADMQVLNTYLHQGVPILDELAKNFHVTTAEVVEMSSQGQISFQDFSKALDGLTASGGQYFGGMELASRSLAAMQEGLKEAVNSLAASFGDMLLPAATDVTGMLTDLTNAINDSPIAKGVLAAAVTLVTGLMTAMAVKAAALAVKTWLAQAAQMGLNASLAVTNPLLWAGIAAAAAATAGYVYYASSQQKAARASEDMAYRQRALNDSMREGSSAVYEFYQAMQG

SEQ ID NO: 107128 - protein, 291 aa, Unknown
  Obtained from environmental sample
  DOMAIN (29)...(181): Eukaryotic translation initiation factor eIF2A
  misc_feature (1)..(291): Xaa is any amino acid
MPIQGRENLYFFRDIQSWVYSVAFSPNGKTFVSGSKDIKFWDIVTGFEIRTLSEHSSGIRQVMLSPNGETVISGSWDKTIKLWDTATGLEIHTLLEYSDTVNSLAFSPDGKTIVSGLGDNTIKFWDTTTNQEFLTLYGHSASVESVAFSPNGKTLVSASKDNTIKLWDVDTGQHIRTLLGHSGWVRSVAFSPNGKIIVSGSNDMKIKLWDATTGQEIHTFSGHSSIVESVAFSPNGKTVVSGSYDKTIKLWDTVTGHVISTFLGHSDTVTSITFNPNSKYILSTSYEKPPA

SEQ ID NO: 107129 - protein, 76 aa, Unknown
  Obtained from environmental sample
  misc_feature (1)..(76): Xaa is any amino acid
MEESLRKHQPPLVKRGRAKFFYLTQAESNPPTFVFFVSDAERVPDNYVRYLEKSLRRLFDIRHAPLRVRLRSSHKK

SEQ ID NO: 107130 - protein, 263 aa, Unknown
  Obtained from environmental sample
  misc_feature (1)..(263): Xaa is any amino acid
LALTDSTLKAWLRESGLDLQTIGFFALIGIPYNLKFLWAPFLDRYSLPLFGRRRGWMLLTQILLGGALLWMSHGDPAGNLAWIAGLALGVAFLSASQDIVADAWRTEALPKVHQGTGSAVWIGAYRVALLATGAGALIVAERFGWKAAYQLMAALALVGAVGTFIAEEPMDIRPPKTLKEAVVAPWRDFLTRRGALLSLGFIVLYKLGDQLATSLMMPFLLDCGFTKDVIGTITKGVGLPALIVGGLLGGFVGSSRVDLQACK

SEQ ID NO: 107131 - protein, 246 aa, Unknown
  Obtained from environmental sample
  misc_feature (1)..(246): Xaa is any amino acid
MKQRNQKTITILTAAFLLAAAVIVTFSCVWEKTTISTYDYNTQTGTPPAYPDALFAVISDTHLYDASLGSSGAAFEITMNSDRKLLLDSQDLLDYAIKEIIASNVNFALVCGDLTKDGELVNHNIAAQKLQKLADAGIAVFVVPGNHDINNPDAVKYTGDTTQPVASINAGDFARIYGNFGFNAAIKRDNDSLSYVAEPVEGIWLLALDACRYRENVPGKHEIVSGKIRKKTADVGSSRVDLQACK

SEQ ID NO: 107132 - protein, 270 aa, Unknown
  Obtained from environmental sample
  misc_feature (1)..(270): Xaa is any amino acid
EYYLDSPQDGPDEKTNLSTVSLGTAFHLGNAVDLQFGMQWFVGDKDKYQNELAIYLARDDAGNNRRATYNAKTIPNWLMFGGVIFKIYTAEPKKEVKPEYRNPDTDEDGVCDAWVAEAGKQQEFANVCKGIDLCPYEQGTRENKGCPAQEAKVEAAPAPIILFTATPDVVQKGNSVTLTWQVTNATSVSIDGVGEVPASGTRKMKPTENTVYKLTAVGEGGTQTATADVEIAAGPLPVILFTASSESVQIGHPVTLKWQVTNATKVSIEG

SEQ ID NO: 107133 - protein, 271 aa, Unknown
  Obtained from environmental sample
  misc_feature (1)..(271): Xaa is any amino acid
KNREFLYKYRPLIGADESQINENTIEILENGELFFSKPSQFNDPFDTKIDYDTNATEPEKIAFYTRLFKQQGEPLSKLYNFLNKVNAEEINLEDIVFKNNLSDFFKIFCLSRDEKNILMWSHYAKEHTGVCIGFKVHKEGDSMNIKIKSGHIRHLANFDSDLFPVQYINYCINKPKPYNHFKDDQDKLKPHLITKSKLWEYEQEVRIILHDNFILKNPICLETNEIGEIIFGLKTPPKLIDKVRQIVNNYPDEGSHIKFYKCVEIKGQYAF

SEQ ID NO: 107134 - protein, 67 aa, Unknown
  Obtained from environmental sample
  misc_feature (1)..(67): Xaa is any amino acid
MDDLFAGTGNNGGQSQGQNQGQSQGQSPLADRMRPRILEDVIGQDHIVGPGRLMNRAIQADRLSSVI

SEQ ID NO: 107135 - protein, 188 aa, Unknown
  Obtained from environmental sample
  misc_feature (1)..(188): Xaa is any amino acid
IADTILGEEKSLSAGVSGEDKTDKKRSGGKTRGTRKPLPNRRSGYTQKSKVGGHSIFIRTGEYDDGSLGEIFLDMHKEGAAFRSLLNSFAIAVSLGLQYGVPLEEYVDAFTFSRFEPNGIVKGHDYVKMATSVIDFIFRDLAISYLKRVDLGQVKPDDLLATGTKTAIRMENGTGHEHNEDGSYQARI

SEQ ID NO: 107136 - protein, 190 aa, Unknown
  Obtained from environmental sample
  misc_feature (1)..(190): Xaa is any amino acid
VNRNDAQGIWDALSQDLAQRLPERAFRDWVHPCAPLSCDGNTLWIQTPTASVKIWVEQQLAEEFHTALFHIGAPDMRLSFVAGGTKIDDRANGKTNGGHTGHKDSSSAHDRSAHSDAILPQGFDRYTLDNFIVGPNSKLAFAAANGIVENFGRQSSFKMNPLFIYGATGLGKTHLMVAWDPLESTCRHAS

SEQ ID NO: 107137 - protein, 92 aa, Unknown
  Obtained from environmental sample
  misc_feature (1)..(92): Xaa is any amino acid
LIEAYYKKNPTINGQPTLPFVVLMEDWRAFELWNPPNFLAGYPNEGNGIVNPQTFEYKTFFTHEISRCWPPQLNEFYKRGLVDRTSFTDTYD

SEQ ID NO: 107138 - protein, 121 aa, Unknown
  Obtained from environmental sample
  misc_feature (1)..(121): Xaa is any amino acid
ENKERLLSFEEPTRFIFSHSALREGWDNPNVFQICTLKHSQSAIGKRQEVGRGLRLCVNSLGERMDSEALGETLVHGLNALTVVASESYASFVEDLQKEIKAALCERPTKASEEYFANQDG

SEQ ID NO: 107139 - protein, 191 aa, Unknown
  Obtained from environmental sample
  DOMAIN (1)...(94): Response regulator receiver domain
  misc_feature (1)..(191): Xaa is any amino acid
MSKYDVFTVPSAAKLFELLEKTMVDIILLDVMMPEMSGYDAIKVLKNNPRTSCIPVIFLTSKSDTNSELEGFVQGAVDFVSKPFSPQLLLKRVDVHGLVESQKKELEHINQNLKRLVEEKTEEIQELQNAILKTMSNLVEYRDDVTGGHVERSEFFLKHLTEEMIKQNVYYDEVKDWDMKLFFKSSQLHDV

SEQ ID NO: 107140 - protein, 236 aa, Unknown
  Obtained from environmental sample
  DOMAIN (32)...(173): Exonuclease VII, large subunit
  misc_feature (1)..(236): Xaa is any amino acid
VKIVILPAPVQGSDAAPIIARRIEQANQWKLADVLIVGRGGGSLEDLLPFSEESVVRAVAESKIPVISAVGHEIDWALCDFAAALRAPTPSAAAELVSAELTTILSNINSISESLTASIKARIEKAKLLLRPFSVEDLEYRFRSILQPRLVRFDDAKENLVDGMAALVDGLRKRHELALAILEAGSPLAVMERGFSVVLNRRTGAIVRGGSDARPGDRLDIRPLHVGSSRVDLQAC

SEQ ID NO: 107141 - protein, 196 aa, Unknown
  Obtained from environmental sample
  DOMAIN (2)...(144): Resolvase, N terminal domain
  misc_feature (1)..(196): Xaa is any amino acid
MIYGYIRVSTDKQTVENQRFEIQKFCKTERLKINNWIEEKISGTKAPEKRQLGKLLKLVQEGDTIICSELSRLGRSFFMIMNILSNCMERGVKVWTIKDNYRLGDDIQSKVLAFAFGLSAEIERNFISQRTKEALARCKAEGKILGRKVGRAANVMLSGHEREIRKMLREGKNKTEIGRRFGVHRQTVRIFIREWD

SEQ ID NO: 107142 - protein, 76 aa, Unknown
  Obtained from environmental sample
  misc_feature (1)..(76): Xaa is any amino acid
EITKVKGVRSIRHLHIWALSTTQTTLTAHIVLKNEISLGDRAKVKDEIRHEALHFGINHCTLETESEGDKCEHKED

SEQ ID NO: 107143 - protein, 48 aa, Unknown
  Obtained from environmental sample
  misc_feature (1)..(48): Xaa is any amino acid
FGFIEMGSDEDLSAAIAGTNGREFDGRQLRVNEAMDKPRRERGGHGNW

SEQ ID NO: 107144 - protein, 279 aa, Unknown
  Obtained from environmental sample
  DOMAIN (2)...(106): Response regulator receiver domain
  misc_feature (1)..(279): Xaa is any amino acid
VDSNLYVAKGLLQRYLLTIDTADSGAEAVEKIKKGRSYDIIFMDHMMPEMDGVEAVRAIREFGYNNPIIALTANAIGGQAELFLKNGFDGFISKPINIHQMNSILNKFIRDKQSPEVIGEVRRQHALSKISARDTSFKMSSTMELAFARDAKKRFQVLESISNNINTATDEDLKLFAVNANALKSVLANVGERTLSKIAHDLEMAGNEGNRAVISTDTPPFLDSLNEIIQKIDADDDSNIFDDEDTAYLRAKLLEFRYACTAYDKKLAQNVLSDIYSKR

SEQ ID NO: 107145 - protein, 97 aa, Unknown
  Obtained from environmental sample
  misc_feature (1)..(97): Xaa is any amino acid
AAIGVLNLMLADSSIEYCEKAALIKEFDSVLGLRLLNKPEKVKRSAKEEAMAKELIEKRNVARIAKNWAESDRLRDELLSIGVVIKDGKNGTEWEWK

SEQ ID NO: 107146 - protein, 208 aa, Unknown
  Obtained from environmental sample
  misc_feature (1)..(208): Xaa is any amino acid
MLEFSVIERGGYIPAVEKNKAFLRADGWNDYSFVTMFYLTVFDEHGEKCDIGNVKIGFVGQKEEVSTYSLIDKKFSQLPEMFFSLGESIDYYVNLSKLSDGFKHNLLKAIQDLVVWPNRLADIENESVLNTSLLRGVTLSEIHGQFARVLNGLPELSDFHFSFNRKSAPGFSDLTIPFEVTVNSMPSTNIHAFIGRNGCGKTTILNGM

SEQ ID NO: 107147 - protein, 97 aa, Unknown
  Obtained from environmental sample
  misc_feature (1)..(97): Xaa is any amino acid
MASVQKRTAFDFVILCFMLLVIVITLYPFLNVTAKSFNDPIDTVKGGIHILPRVPTLQNYIGLFARGSNLPIAFRNSVLRTVLGAASGVLCCAMFAF

SEQ ID NO: 107148 - protein, 207 aa, Unknown
  Obtained from environmental sample
  misc_feature (1)..(207): Xaa is any amino acid
DTYTRTDTRSYTVTASATGYNPKTSLPATVSAVSGTALWAKTVSAGTNSSLFNAVACDQSGNVYAAGRITGTDSITYGPGVSAQGIYSGGNNVVLVKYNASGTAQWAKTVSAGTNTTEFNAVTCDQSGNVYAAGIQWGTGEYTYGPGVTAQGINSNTNVVLVKYDASGNALWVKTVSAGSSLSSFNGIACDQSGNVYAKGYQYGGIL

SEQ ID NO: 107149 - protein, 179 aa, Unknown
  Obtained from environmental sample
  misc_feature (1)..(179): Xaa is any amino acid
TLKGLPILAGICLIFALILIKGTNRAKPAGPILVLALFFTALAQPLALVTVPSLDALLSPRPQADILRAYRDKGYHAAAFFVTSGTYTFYMGGPMDEINDWANLQKRLAENSRIVIATRMGRWKEWQQRAELEPETFRMINSQWIAEREYVILARDEAPAPVIPRLLPKAKWDPLESTC

SEQ ID NO: 107150 - protein, 184 aa, Unknown
  Obtained from environmental sample
  DOMAIN (1)...(184): TatD related DNase
  misc_feature (1)..(184): Xaa is any amino acid
MIVDAHCHLTGGYQRDNDVDGMLGRAKAAGVIGAVAVGTDLEDSKKVIELVESYSSTRASLGVHPQDAKTWGIETKMELRSLLKSPLALFVGETGLDWHYDLSPRDLQENAFRAQIRLAIEIGNSLMVHTRSAPDATWAILEEEGASKVGGVIQCFTEDPPFAQRAVDLGFYISLSGRIAFPIN

SEQ ID NO: 107151 - protein, 65 aa, Unknown
  Obtained from environmental sample
  misc_feature (1)..(65): Xaa is any amino acid
MASYSSLTNTFGILTSGGDCPGLNAAIRGVCRAAYDRYGMIAIAMANGFRGLIQENARVLRPIDF

SEQ ID NO: 107152 - protein, 247 aa, Unknown
  Obtained from environmental sample
  DOMAIN (5)...(164): Survival protein SurE
  misc_feature (1)..(247): Xaa is any amino acid
MCVWLRPSRSKSGVGHSFSFYRSLHYAPAENFPCEAFWVDGTPADCMKFALKHIYKDLNFDLVISGVNNGDNAGVASFYSGTVGAAREAALWKVPAIAVSLQRQSDMALEYALKWVQKTLRESLFKDMPKQTLWNFNVPPCTKENPCKGVKVSTTSTSMFNDYYVEAESSKNYLGKETAYLVNEDSAAGGKPRAANEELKAYNLMGNKAPDLREGTDDWWLSKGHASLSPQSIDKEGRVEYERLIKI

SEQ ID NO: 107153 - protein, 173 aa, Unknown
  Obtained from environmental sample
  DOMAIN (1)...(103): Galactose-1-phosphate uridyl transferase, N-terminal domain
  misc_feature (1)..(173): Xaa is any amino acid
VFINDFAALMFDTPDAPESHDPLMRCQSARGTSRVICFSPDHSKTLPELSVAALTEIVKTWQEQSADLGKTYPWVQVFENKGAAMGCSNPHKHGQIWANSFLPNEAEREDRLQKEYFAEQKSPMLVDYVQRELADGSRTVVETEHWLAVVPYWAPPRSKRYCCPKPTFYGSPI

SEQ ID NO: 107154 - protein, 96 aa, Unknown
  Obtained from environmental sample
  misc_feature (1)..(96): Xaa is any amino acid
MGRRSFVSSVIAYERLKGRQYNAQIREAKRIQRGLEQQKKLYAKMSELQQAEFEVKEYENYIERLISIHKDCAESFDWIELLKTLPPSKPVFDKNT

SEQ ID NO: 107155 - protein, 168 aa, Unknown
  Obtained from environmental sample
  misc_feature (1)..(168): Xaa is any amino acid
VQEIHIEENFYRKKIDNYQPSLFAKIFKIDKKNLRKWEEALELGRSVDAKNTLSAKEQAEKDYESAINNYNKHCEELNKKYEDEYKEYTGLINLAKKINEGDLSSYAYIIQDLDPFSEISEFGSEVEFTICTKTKAKASIKVHDDTVIPKQSKSLLKSGKLNIKDIPI

SEQ ID NO: 107156 - protein, 230 aa, Unknown
  Obtained from environmental sample
  misc_feature (1)..(230): Xaa is any amino acid
MGNNYYKRFTDAALQDRLRFSGAVLIQGPKGCGKTETAVHAAKSLVRLDTDDEIRKIMEVDPKLVLAGPTPRLIDEWQEYPRIWNYVRREVDDRKKKGQFILTGSATPEERARLHSGAGRFSIIKMRPMSLFEKGWSSGEVSLAKIMKGGVPKSGQAEFDLEILAEKITIGGWPGLIGAGNRAALRFMQDYIALIAEVDISRFGGKRREPQKVRRLSQSLARNISTEASI

SEQ ID NO: 107157 - protein, 91 aa, Unknown
  Obtained from environmental sample
  misc_feature (1)..(91): Xaa is any amino acid
MNIQDARMCARYGADILEYVVDYPHAVPWNLDAKHAQELIQAVSGPAKTCVVTGGSPDRVFRIATETKPNYIQLHCNETLADTVQLADELG

SEQ ID NO: 107158 - protein, 86 aa, Unknown
  Obtained from environmental sample
  misc_feature (1)..(86): Xaa is any amino acid
LGLALVLAIWLSDVRLKLSGKGPFRAIVYMPNLLTAASVALLFRSIFGYAAHVTAPANQFLYSLGIQDTNRIFYETINRYVEVKSG

SEQ ID NO: 107159 - protein, 93 aa, Unknown
  Obtained from environmental sample
  misc_feature (1)..(93): Xaa is any amino acid
VNKLQRLCGSFSAALLDLDKPWKVIARPRPYIINPREIYELAGDVPNVTFPVASLVDKDTGRVAIYYGCADTVTGLVFGKVDEIINWVKKNKF

SEQ ID NO: 107160 - protein, 188 aa, Unknown
  Obtained from environmental sample
  misc_feature (1)..(188): Xaa is any amino acid
LIKRYGAAAVVMLIDEKGQAVNFDRKIEIAGRAYRLLVDSDFPPENIVFDPNVLAVATGISEHDACAVDFIRACAWIRDNCPGVNISGGISNLSYSFRGNNKVREAMHSVFLVHAQAAGLTMAIVNPATLIAPNTIEEDLRNAVEDVILNHDPGAAERLLALAEKISAASSVPHSSFLIPHSSSDWRN

SEQ ID NO: 107161 - protein, 60 aa, Unknown
  Obtained from environmental sample
  misc_feature (1)..(60): Xaa is any amino acid
TARWVECADAKKFEEFKRKNESQLALDGGDNLAYIATSMVNLRLAQERYPDVQFHQTREH

SEQ ID NO: 107162 - protein, 82 aa, Unknown
  Obtained from environmental sample
  DOMAIN (12)...(66): Helix-turn-helix
  misc_feature (1)..(82): Xaa is any amino acid
MLNLRDILANNLKENRRKSATPQSKLAEKAGISTQYIAMIELSKLFPSPEVLERIAEVFDIEAYELLTVPPSPENTIVRLHK

SEQ ID NO: 107163 - protein, 56 aa, Unknown
  Obtained from environmental sample
  misc_feature (1)..(56): Xaa is any amino acid
MSSGMNEFLEVNGFGLAPVQAIKAASVFMSAIPMLLVYPFIQKYFTKGTLLGSVKG

SEQ ID NO: 107164 - protein, 232 aa, Unknown
  Obtained from environmental sample
  misc_feature (1)..(232): Xaa is any amino acid
EIKEKNILDFISKFFDTDKAHEQLVVKVNEQWPEFFYHILQTNEFSCSQIKRYSIDTLYYSDETTIENVNSNNCLSDYISNCSDYLAIEHPDTCKLVSRFLHIGVSFVAINYDVADRSLFDEVYRQNLYSISFENITLMLKYQYNIQDDSNIVQKNYTLIQSYAGSPLSNYISGNMAAYTRIIIANCDGSISDDENIAICILNNSDIDVATKKQYIKLLSTNISNISLIDNH

SEQ ID NO: 107165 - protein, 51 aa, Unknown
  Obtained from environmental sample
  misc_feature (1)..(51): Xaa is any amino acid
MVGMKVIAVFYITAMKGILLAGGAGSRLYPLSAVASKQLQPVYDKPIVYYP

SEQ ID NO: 107166 - protein, 95 aa, Unknown
  Obtained from environmental sample
  misc_feature (1)..(95): Xaa is any amino acid
VPAEFKTEEICLEAVKQYGNMLKHVPESLKTAEICLEAVKQNSSALEYVPENLKTAELCAVKTKSEEAEIEAALAGIDELELEELEDLFLTPHGA

SEQ ID NO: 107167 - protein, 97 aa, Unknown
  Obtained from environmental sample
  misc_feature (1)..(97): Xaa is any amino acid
VETNNDPKEKFHIYLAFGQSNMVGYLGSGVGSGGGSSSQTWVAKNKFDTPPDNFVVMAAANENKNPYKRKKGEWYEAIPPLVRNNTGLSPADFFGRT

SEQ ID NO: 107168 - protein, 90 aa, Unknown
  Obtained from environmental sample
  misc_feature (1)..(90): Xaa is any amino acid
MNGLWILVISVVVLSLAYLLYGRFLARRWGIDPAIKTPAHELEDGKEYVPTSPAVVFGYEFASIAGAGPINGPIIAAMFVGSSRVDLQAC

SEQ ID NO: 107169 - protein, 39 aa, Unknown
  Obtained from environmental sample
  misc_feature (1)..(39): Xaa is any amino acid
MKVVILAGGYGTRISEESILKPKPMIEIGGHLMLGHSMK

SEQ ID NO: 107170 - protein, 79 aa, Unknown
  Obtained from environmental sample
  misc_feature (1)..(79): Xaa is any amino acid
MIEARVRAKGIYSNWRVSLVDLMTALDMDSSLAGRQRLAAMLERAGYAADDSTEKNMWLHAELLKALAQNRGEVPSYLL

SEQ ID NO: 107171 - protein, 135 aa, Unknown
  Obtained from environmental sample
  DOMAIN (1)...(63): HAMP domain
  misc_feature (1)..(135): Xaa is any amino acid
TGIVFAVILSLAIRYAIFAPIKYTIRFLNNLGGDLTRRLAVKSKDEIGNMSVIFNQTFDSIDSLVKVIKDKSLSLQNISNNLSNHMTETSLATNTIMTEIHKTKEHIDVQGINITESDQAMNVIMGTIGNSERVH

SEQ ID NO: 107172 - protein, 97 aa, Unknown
  Obtained from environmental sample
  misc_feature (1)..(97): Xaa is any amino acid
MLLWEPLETLNGYIKDQADSVSVSSSAIEEMFVNIHSVIQTFIRNAENVAALTSASEAGKISINAVSRDVEQIAKDSEGLIEINAMMENIASQTSLL

SEQ ID NO: 107173 - protein, 196 aa, Unknown
  Obtained from environmental sample
  DOMAIN (30)...(95): His Kinase A (phosphoacceptor) domain
  misc_feature (1)..(196): Xaa is any amino acid
VKKHSSDDAGASVSRTSGGKGAKAHTADHIENDFLVLLSHELRTPLNGIMGMLQLAMHTRSRDSIQEYLTVALESSQHLLFLRSGVSEIFSGTEGHHAKAKSFDPASIINPIISSFAAKAGSKGLALSCRIDSGLPERLVGDPGHIRQILCNLLTHAVRHTESGNISVLVERPAEDGPMQGNGLHMLIRPDSADTA

SEQ ID NO: 107174 - protein, 107 aa, Unknown
  Obtained from environmental sample
  misc_feature (1)..(107): Xaa is any amino acid
MKFVEPSCSDNSHCEGAGTKLKAADGWNSSTNGTPKGTDNYGFSALPGGYDYSDGYFSSVGYYGYWWSSSENSANYAYYRDMDYGYEGVYWSIVSKSYSQSVRCLQD

SEQ ID NO: 107175 - protein, 93 aa, Unknown
  Obtained from environmental sample
  misc_feature (1)..(93): Xaa is any amino acid
TIEKVRDRLNPDLEIDGILATMFDARTLHSREVVNRIHEHFGDTLLHTVIGRTVKFPDATVAAAPITEFAPNHPGAQAYRQLARELVARQANK

SEQ ID NO: 107176 - protein, 275 aa, Unknown
  Obtained from environmental sample
  DOMAIN (1)...(275): Pyruvate kinase, barrel domain
  misc_feature (1)..(275): Xaa is any amino acid
MDVARINRSHGSFEEHEAVYNNVREAAKASGRNVAVLVDLQGPKIRLGKFKGDEKHYLNVGDKFTITTEDIEGTKDIVSTTHKGLADDAKVGDALLIDDGKVRLRVTDVDGPRVNTVVEIPGPVSNNKGINLPGAAVSVPAMSEKDIEDLRWGLRLGADFIALSFVRNAKDYDDVRKIMEEEGRVVPVIAKLEKPQAIENLEEVIAAFDGFMVARGDLAVEMPLEEVPVIQKRIIELARRNAKPVIVATQVLESMTNNPRPTVGSSRVDLQACKL

SEQ ID NO: 107177 - protein, 109 aa, Unknown
  Obtained from environmental sample
  misc_feature (1)..(109): Xaa is any amino acid
MPSPMSNGDSAFGGWYKDPDFANAWDFDSDTVTGDTTLYAKWVLKDHTITFEAGGGNPVPTQQHVLGRGTVTMPPPMSKDGYAFVGWYTEASFGTLWNFDTPVTSDITL

SEQ ID NO: 107178 - protein, 235 aa, Unknown
  Obtained from environmental sample
  DOMAIN (163)...(233): Sporulation related domain
  misc_feature (1)..(235): Xaa is any amino acid
TKDVAPKISERPPVEVAKDLPEYNPNRSYEDTETPLKEVVKDVPVFITEAPRNEVVKEVSPWEEKTEVVTPVTPPPETVTQTPPPPPSETVTQAPPRQQLVPVETSPNPPPSDVYGINPNDIIPGIVVATPEKPAAAVNTTPNTPVTPAPDSNLPVNTIDRLDRGKYYVQVAAMSPDLVEGALRQIDRGYAPVVFKGTDNLYRILIGPLNQGESAAVLSRFRSIGYKDAFVRKGG

SEQ ID NO: 107179 - protein, 157 aa, Unknown
  Obtained from environmental sample
  misc_feature (1)..(157): Xaa is any amino acid
MAGGLIATTRRGTMRPLTVQGIFATDCWHQLRSLLEQRLGPAYANLLAEPVHDPAHENVDWHTGVEGTPTPLSALPPEQADAARARIGRMAAEIRAAAEDISKDPDSRRALSGQLLLLCLQHPHEDDLWLAGDQPLVCCWGFAPGTMGAQPEDRGIL

SEQ ID NO: 107180 - protein, 83 aa, Unknown
  Obtained from environmental sample
  misc_feature (1)..(83): Xaa is any amino acid
DAKPPLIVHSAVISQGNSGGPLVDEDGAVIGVNTLISLDDESYRQSSFAIAASDIAAFLKEQGIPYVPASAKPDSARPSGGKE

SEQ ID NO: 107181 - protein, 173 aa, Unknown
  Obtained from environmental sample
  misc_feature (1)..(173): Xaa is any amino acid
VDRFKNETFVIKIDSAVIANPLFPVLVRDIELLRRIGIRIVLVPGSRMRIDEVLSAYKIECPYVNGVRVSYPEAIPFINMAAFDVSNRIMTMLAENEAGAIIGNWVRAKGIGVRGGVDFRHSGVVESLHTDLLRKILDEGIIPIFPSIGWSAKGKPYNLSSNDLAFTIPRTAR

SEQ ID NO: 107182 - protein, 60 aa, Unknown
  Obtained from environmental sample
  misc_feature (1)..(60): Xaa is any amino acid
VTDNPNKKVLVTGAAGYIGRYVVKELLDLGYHVIASDLSTNGIDDRAEIVTEDIFALGHH

SEQ ID NO: 107183 - protein, 233 aa, Unknown
  Obtained from environmental sample
  misc_feature (1)..(233): Xaa is any amino acid
MKRKSPLSNLFSRRPDRKSDAQEGADTEAAKPSLPELRLIFFIVDWNRANVVSDVFLEEKVRFYFLSKGRGTASSDILDLLGIGAGDKAVMICLEQQVLVQVLMKEVRKKLRHGPGAGIAFTVPLSAINDPVLLIFKQSIHKNEKIATELGLKATENSGQENKEKNMESNTITHAHDLIVAAVNHGFSDELMNTARGAGASGGTVINARGQGHEGAVKFFGIPVQDEKELILI

SEQ ID NO: 107184 - protein, 251 aa, Unknown
  Obtained from environmental sample
  misc_feature (1)..(251): Xaa is any amino acid
VRGSLVWAFALVMVQNVLSALTLLSFPQVLAYWMLYAAFFALRVFREKPSRIAWPKPDGHMCVLVCIALLTLLAAALYPPTTADSMTYHLPKVMHWQQNNSLEHYYTSILRQTGLSPFAELVVFHSFVLSGTDFLANFVQWSAFIGITCVAAGTAALLGAGKTGQILAALFFATLPMGIAQASSTQTDLVVGFWLMCMAARFLIWKNETTTRNAAYFGMAVGLAVLTKGTGYIISFPFVIAFAVFSMKQYR

SEQ ID NO: 107185 - protein, 160 aa, Unknown
  Obtained from environmental sample
  DOMAIN (5)...(160): Glycoprotease family
  misc_feature (1)..(160): Xaa is any amino acid
MGPQRCLVPADLDAVAVARVPGLLGSLLVGVAFAKALALASGARFIGVNHLHAHLLAAGLQEPVPWPCLGLLVSGGHTEIYLMESPARFTRLGRSLDDAAGEALDKIAKLMGLPYPGGARLDILAQRGRADPTLFPRPYLENDNLDFSFSGLKTAVAARL

SEQ ID NO: 107186 - protein, 250 aa, Unknown
  Obtained from environmental sample
  misc_feature (1)..(250): Xaa is any amino acid
IREAQLELMQLIIRGFNDDALVAAEAGTGVGKSFAYLLPALSYAAVNEERIVISTATITLQEQLYSKDIPMVASALNKKIKAVLVKGRGNYLCRRRLDDALRESTLFDEERGQLEDIARWAETTGTGSRSDLAFLPEEGLWSRVCSEADNCMGMRCGERERCFVMLLRREASDARVLVVNHHLLFADLAARRDGAGYTGAVVLPPYTRVIIDEAHTTEEAATSFFSGEFSRLGIYRSLGRLYRKRRAQRG

SEQ ID NO: 107187 - protein, 165 aa, Unknown
  Obtained from environmental sample
  misc_feature (1)..(165): Xaa is any amino acid
KHSICYWGSASNIEIKQRKIINRFKTLDFGTGFYTTSNKEQAEIFAHKVHSRRKKDGSPTVNVYEFNDKALELNTLIFDSPSEKWLDFVVYNRKFGRKEYYDLIIGPVANDDVFSVIALYESGNLTKNEAIERFKVKSLYNQYLFCNEKALSNLTFMESHRLEVQ

SEQ ID NO: 107188 - protein, 74 aa, Unknown
  Obtained from environmental sample
  misc_feature (1)..(74): Xaa is any amino acid
TEREKSSAEKHAFTLKDLAVSGKDLMEIGIESGKTMGIILDELLETVLDDPAQNTREKLLEIAGKIFKQRAKSN

SEQ ID NO: 107189 - protein, 189 aa, Unknown
  Obtained from environmental sample
  DOMAIN (3)...(189): Protein of unknown function DUF52
  misc_feature (1)..(189): Xaa is any amino acid
AVFLTGKEVTRRSRCAISPHAGWYYSGRIASIGAASLERDAETVAVIGGHLSAASPVLFAMEDAVRTPLGVMQIDKELRTVLNKELDGEEDKFRDNTVEVLLPMVHYFFPKAMFLWIRLPAAISSYEAGKIISQVSEKSGRKINVLGSTDLTHYGRNYGFMPQGSGRQALRWVKEVNDANLIKAAESGN

SEQ ID NO: 107190 - protein, 276 aa, Unknown
  Obtained from environmental sample
  DOMAIN (191)...(260): HAMP domain
  misc_feature (1)..(276): Xaa is any amino acid
MRNIKIGPKLIGSSLITAALIAFMGIYSMKSVTALDAGTNLLYTKGAVPLGMLVKTAHLLQDTRINVRRWQASKTDAERAAAVKAIDDAYASVKELMSKQKELALDESGKKALDDLSKSVDAYLAEAYGFTKTAKTFTLEGTNIDDFPPAFLNTSREMLKALDAVVESAVGKASTLSDNATKLAANTESVTATIIIVALLFSTGFSIFLIFSITHPLKIVVSTLHNMEKGDMTVRAGLKREDEFGLISKALNSLSARLQKIFEHLWDPLESTCRHA

SEQ ID NO: 107191 - protein, 188 aa, Unknown
  Obtained from environmental sample
  misc_feature (1)..(188): Xaa is any amino acid
GKKRKNHSKIYWDNFDWTRPSISAYFHREDKAPWFSEYVRRELDQMMYGSMDYYRDGYVVHTTMDLRHQAAAEKYLAAGLEKANREYAKSSVRSIVQAERVYTPIIDLLTITFDLTDIREAISGQNERRAVSRYTKTINSIVDMSALAFGIPELKDITNAGFAELRTTTEKNVVEGALISIEHMKQVI

SEQ ID NO: 107192 - protein, 85 aa, Unknown
  Obtained from environmental sample
  DOMAIN (3)...(83): RelB antitoxin
  misc_feature (1)..(85): Xaa is any amino acid
MSNELVQAHVNGEIKAEATAVLADMGLTVSDAVRILLTKVAREKIMPLELLTPNDTTLAAMKDARAGKVEPVTIDEIRAAIRANN

SEQ ID NO: 107193 - protein, 129 aa, Unknown
  Obtained from environmental sample
  misc_feature (1)..(129): Xaa is any amino acid
VKDKGIRQGDIIGQDGFEASHDDVLRGEDGLREIVTDFLGREVAPLDEIPPKPGETVFLTLDSGMQSILQEAYGEENGAAVVIDLRDGGILAMYSSASYDPNAFMDRRNPQKTEYLLDSDGRKRLYNRA

SEQ ID NO: 107194 - protein, 229 aa, Unknown
  Obtained from environmental sample
  misc_feature (1)..(229): Xaa is any amino acid
EIPQKRVPPNGDEPPNRPEAADFGPDSEPDAGAESRRSLFTGAGESELAWETVPLARLPVALYQTILQVLFAAPAFYIRVGKSRASLLRPSAFYVLIGALQSVVQHFWLLARLDELASLQDPKIQASLDTMTQNLSLPMLLISMPLILMIMLLFYAGLFNLMIRLMQPDRASFAVTLRVVAYSAAPGVLSVVPVAGSPVAAIWFAFCCFVGCKYALNLEWKRAAMAFLP

SEQ ID NO: 107195 - protein, 64 aa, Unknown
  Obtained from environmental sample
  misc_feature (1)..(64): Xaa is any amino acid
GQVTAKFFPAKLAAMESQWETKTEAPLNLVVIPAVGDDEENLYEALPIPGLASFLATGDSQAAV

SEQ ID NO: 107196 - protein, 265 aa, Unknown
  Obtained from environmental sample
  misc_feature (1)..(265): Xaa is any amino acid
CRLFLPQAETVQAFNDALALWTAANFELWGRNMPPQGDEDMVIAWCAESLRRGLYQSAASVIPLGFSRSPGRTWESAVYQFDRRIGHWEREIRTVHTLEREKANRITRQIIEKDIGIFAENRIIEFLAVRDNNRLLEDLLSIVKDINLSAVSLETDAGIIEACVDMGKWHPNIANPFEALTDQIFQLVVNGLYRNEDRVFILSSEQADIALNLRLGMALFEWGEKSGQSVWAGLGRSIALSVISLADENGWVPAFLTVGENNEYT

SEQ ID NO: 107197 - protein, 173 aa, Unknown
  Obtained from environmental sample
  misc_feature (1)..(173): Xaa is any amino acid
SKFPTMPETSRDWPSAEHSTTYVGRDNEIDRIVQILSRRRKNNPILLGESKIGKTAIVEGLAQRIYEGRVPVGLSDKRIYALDLSLVVAGTKYRGQFEERFKAILAETSKDPNVVLFIDEIHNIIGAGSAEGSLDAANILKPALSRGEIQSIGATTHKEFAKYKEKDRSVGSS

SEQ ID NO: 107198 - protein, 225 aa, Unknown
  Obtained from environmental sample
  misc_feature (1)..(225): Xaa is any amino acid
MAITATRQLIETCVQSDNLRLNEKAFSRERRLGAKKMLQIILYRIYHALQLSLDQYFAGIGENPVSKQAFSQARKHLNPGYVRSFADMTSKLAADDQTLPNYNGMRLIAIDGSDVALENTPELKEAFGCSGSKKNAATALCSIAYGPLDQIIYDCRIDRYDTDERTLAKAHILRLTELGLKGSLLLHDRWYPSAEYIAFLYESGFHFVMRVRNKYNVPHDAIRTQ

SEQ ID NO: 107199 - protein, 254 aa, Unknown
  Obtained from environmental sample
  DOMAIN (196)...(245): Cna protein B-type domain
  misc_feature (1)..(254): Xaa is any amino acid
RPLAGAHLRVQGYFAEGGTNGMPIDRIQVTGSDGKVVFDALPAGQYTVSEAEAPAGYLLDGETFRSVSLTWGQTESTAFYNTPKSSLEVLKIDGNTGALLSGAIFTLRDPATGETWQATAGGNGIALLGKGSSGNELIPGKTYLLTEIQAPAGYVLVTEPREVVLSPGDNNRETVRNYKKPTLTVIKYDELTNEPLAGASFRLWKTEGETWEETQITNANGRITWTDLDPGIYSVQEIDEHIVGSSRVDLQARK

SEQ ID NO: 107200 - protein, 242 aa, Unknown
  Obtained from environmental sample
  misc_feature (1)..(242): Xaa is any amino acid
MLFGKYDIVIFKEGRSGSRNLHLRGWLGIIGFVFVTLLIVSNLWLWDRYHQSHKLESRLLEAEKTIDEQNTQMLSMIGKVREVAADLTRVRQFDAKLRLMMNLDSELMDVGNPGMSPSEERGALPLHRQALAARKMYAFLRQLAEDVRLEEVTQQELLRVLRENRDSISAMPTVWPTEGFISSPFGVRSSAFSGRGEFHRGIDIRARPGTPITAPGKGVVSMAGGDGAYGLSVEIQHSRVIA

SEQ ID NO: 107201 - protein, 173 aa, Unknown
  Obtained from environmental sample
  misc_feature (1)..(173): Xaa is any amino acid
NKFVAVGAKGKIGTSTDGATWTAVAESKFGTKIINAIAYGNNKFVAGGLLNGQIAYSTDGVTWTAVDISSMFEGAIDAIAYGKGKFVMGGYGKMAYSSDGVTWTTAVGTISAFSSIAYGGDKFVAGSYGAMKTSPARFSVPTGGVFWLFCKVLGRESLSHGMSLFVICGRLEA

SEQ ID NO: 107202 - protein, 74 aa, Unknown
  Obtained from environmental sample
  DOMAIN (3)...(57): Pyrimidine nucleoside phosphorylase C-terminal domain
  misc_feature (1)..(74): Xaa is any amino acid
WRGNLTEDPVSPTAGLQFHRKRSDAVKRGDPIMTVWGKDAPSLEAALPRLAEAVEYSPAPPPARSLILKEIGSA

SEQ ID NO: 107203 - protein, 160 aa, Unknown
  Obtained from environmental sample
  DOMAIN (12)...(103): N-terminal ig-like domain of cellulase
  misc_feature (1)..(160): Xaa is any amino acid
VRYYSLFLAIFLAVCVAYAQDILVNEVGYEQSGPKRAVIQSSANISESRASLVDLQGNEKYGINLGAQTSVSGWSGRNFKVADFNDFKQNGTYKLKVGSRESQPFKIGEKILQAETGEFQVSFFNRMRNTDEGDRNLGIRGGSTHNIYGGRWDVYRRPRQ

SEQ ID NO: 107204 - protein, 77 aa, Unknown
  Obtained from environmental sample
  misc_feature (1)..(77): Xaa is any amino acid
ESNAQEKRIIGIVAGSDDETNKTSLSEKEITGENIFDEIKNIRNYRNHPFEFYKKCGFSIIAVIPNANGPKKPDIWI

SEQ ID NO: 107205 - protein, 142 aa, Unknown
  Obtained from environmental sample
  misc_feature (1)..(142): Xaa is any amino acid
MVDIAETKSMWFGESEKRIKDIFTRYRSLAEEMELTPILLFNEADDVIGKRKDVSSSSVAQTENAIQNIILQEMENLNGILIATTNLTQNMDKAFERRFLYKIEFKKPELSVRQSIWQCMMPSLSGEDAQTVASRFDFSGGQ

SEQ ID NO: 107206 - protein, 108 aa, Unknown
  Obtained from environmental sample
  misc_feature (1)..(108): Xaa is any amino acid
MAQVYGWMTVGLLLTAFVAWYAANSAAVMELLFTNRVFLIGLIIAQLALVIVLSAMIQKLSAGVTTMLFMLYSALTGLTLSSIFIVYTAASIASTFLFKAGMFGAMSL

SEQ ID NO: 107207 - protein, 100 aa, Unknown
  Obtained from environmental sample
  DOMAIN (1)...(72): MoaE protein
  misc_feature (1)..(100): Xaa is any amino acid
ALEHYPGMTEKALAEIVDEARNRWPLGRVTVIHRIGELWPGDEIVFVGVTSAHRSSAFEAGQFIMDYLKTRAPFWKREATPEGDRWVEARESDQQAAKRW

SEQ ID NO: 107208 - protein, 207 aa, Unknown
  Obtained from environmental sample
  misc_feature (1)..(207): Xaa is any amino acid
FRHRTRTGQLRTYRLAKLFCQRNVLFAANTATDGSEPNTANFVQGYVEGIWQIWQMQRAEDNGQTFEPLIDVQTRYWFNPAAISQHFIIPGAVIFIMTVIGAILTSLVVAREWERGTMEALLSTEITRTELLLCKLIPYYFLGMLAMLLCMLVSVFILGVPYRGSLLILFFISSLFLLSTLGMGLLISTITRNQFNASPGRPESPFS

SEQ ID NO: 107209 - protein, 125 aa, Unknown
  Obtained from environmental sample
  misc_feature (1)..(125): Xaa is any amino acid
LVNTNIEITLTVKDLSVGNTYDSFSGLHLIDLTGVLPEDFGIASPCSVQFDNGVGKLSLKPKNSGAQILWFNMENPNYPAINPIVITPILPIGTPPVTPPDSSVKPPVTPPVTPPVTHTPNVLPS

SEQ ID NO: 107210 - protein, 181 aa, Unknown
  Obtained from environmental sample
  misc_feature (1)..(181): Xaa is any amino acid
ETVKQSLRDRAKLRWIALAIVSFTMLCGYYFEKVTSAIKPALEAQAKWDSTQFGLFRFSYMWLNVFAGMLVIGGIILDKKGIRFAGVMATIIMVLGAGLCGMGLWGGAHWGFPVMTQVWVASCGFAIFCMGDEIAGITVSKTIVKWFKGKEMALAMGLEMAAARMGTGIGLAIGLPIANKW

SEQ ID NO: 107211 - protein, 196 aa, Unknown
  Obtained from environmental sample
  DOMAIN (27)...(182): Carbon-nitrogen hydrolase
  misc_feature (1)..(196): Xaa is any amino acid
VLALGFGYGRIRHEHWEAAADRALSLTVTVIQPSIDQAEKWDPQERDRHLALYGSLAREAGRTAPWLLLWPETALPFIYGTDPEETAWIKGLTSELGGQNLVGVSALSGDWPDQTLHNRMLLFQDGRPGPWYDKRHLVPFGEYLPLDWLPFLNLDFMRGVVGAAGTYDPGLPQPPLDLSLGPDQDRQVQKGILICF

SEQ ID NO: 107212 - protein, 99 aa, Unknown
  Obtained from environmental sample
  DOMAIN (16)...(51): UvrB/uvrC motif
  misc_feature (1)..(99): Xaa is any amino acid
MEGVYAARMLLEGKNTEILARLQRKMQIASAEMRFEDASKYRDQVFAVQSAFAKQKADHANNAGLSLDVIAVCRSKEQAAAVIVEYRSGILFNRRHFYW

SEQ ID NO: 107213 - protein, 115 aa, Unknown
  Obtained from environmental sample
  misc_feature (1)..(115): Xaa is any amino acid
MDEAKIELLFDGARYDYWQRAEIRASVDDLCASLRLNVTAPGTGSNLGVTPNTVIKVMIGGQLVTTVRLDKLSRSVGKASHDIHIDGRSLRRELVDTQLSKTLSGLTWDPLESTC

SEQ ID NO: 107214 - protein, 104 aa, Unknown
  Obtained from environmental sample
  misc_feature (1)..(104): Xaa is any amino acid
MASLFGRKIEDVLGKDDITAFGMPPETAALANENDMKVVNEKRRIAYEEWLACSAGVKRLFEMVKSPLIIDGEVVGIMAIGRDITKRKEMEEVSKALSTPNHLS

SEQ ID NO: 107215 - protein, 108 aa, Unknown
  Obtained from environmental sample
  misc_feature (1)..(108): Xaa is any amino acid
GKANTDGTWFTPEDADKIRLTDEVVLNEEKVISHETRIHSPSTGKEGVFETVKAPLWQDGVVVGIVAIIRDITKRKQMESDLSLQTSLFRTMLSSLPDAVFCKNLNFR

SEQ ID NO: 107216 - protein, 57 aa, Unknown
  Obtained from environmental sample
  DOMAIN (3)...(56): YcfA-like protein
  misc_feature (1)..(57): Xaa is any amino acid
MKKSELIQKLNRQGAVFVRHGAKHDVYMQPKTNKEATVPRHEEINEYTAKAILKKLS

SEQ ID NO: 107217 - protein, 160 aa, Unknown
  Obtained from environmental sample
  DOMAIN (125)...(146): MORN repeat variant
  misc_feature (1)..(160): Xaa is any amino acid
MKKRTGIFNMAATIVVAMVMFTVDCKAADDEVDFKELTQKGDVNFLTKTGKPFTGKYVKYYESGRVMEKGDMKDGKEYGIGKVFYESGKLKMEANLKDGKVNGIIKEFYENGNLRTEFNTKDGKMQGIGKSFHENGKLRSEVNYKDDKRHGIYKEYDEKC

SEQ ID NO: 107218 - protein, 206 aa, Unknown
  Obtained from environmental sample
  DOMAIN (1)...(202): NIF3 (NGG1p interacting factor 3)
  misc_feature (1)..(206): Xaa is any amino acid
LLGPRWLAQKKGCQMIIFHHGIIWEGIKSITGPLYKQIEFLVKNNINLYASHLPLDCHPTLGNNIQIAKALGLSNIQPFGTYRGIKIGFEGYLKTAASVKSISELVKRKFGGPVSSLSFGPQKIRRVAIVSGGGSSSIPEAIEKKIDLYITGESSHENHHAALEGNLNVIYGGHYHTEKAGVQALGKFLSKKFGVETEFLDIPTLV

SEQ ID NO: 107219 - protein, 87 aa, Unknown
  Obtained from environmental sample
  misc_feature (1)..(87): Xaa is any amino acid
MKQYTEMNAAELSALKKELDEAFLKHKEKGKKLNMTRGVPSNEQLALCNELSTCLSVYDYKTANGADCRNYGGIDGIPEMKKMFAAL

SEQ ID NO: 107220 - protein, 98 aa, Unknown
  Obtained from environmental sample
  DOMAIN (1)...(98): ThiF family
  misc_feature (1)..(98): Xaa is any amino acid
VGSWCAEALVRSGVGGITLVDSDIVSVSDFNRQVQASGENMGRLKTEALKEHLNEINPACEVVSFPRFFSKESAELFGISEADYVIDAIDTLKSKLGL

SEQ ID NO: 107221 - protein, 196 aa, Unknown
  Obtained from environmental sample
  DOMAIN (38)...(195): Aminopeptidase I zinc metalloprotease (M18)
  misc_feature (1)..(196): Xaa is any amino acid
MDSNIKDKLLFPRKDASVFMRQEEIKTADEYCKAYISFLNNAKTEREAVNAAVALAQKEGFIPWKKGTKIKSGDKIYLTRRGKAAVFCTIGGKKLAQGISIVASHIDSPRLDFKMQPLYEDSGMAFFDTHYYGSIKPYQWTGIPLALHGFFVLKDGQELNIKIGEEPGDPRFFIADLLPHLGEELMKKPMKDAIPA

SEQ ID NO: 107222 - protein, 128 aa, Unknown
  Obtained from environmental sample
  misc_feature (1)..(128): Xaa is any amino acid
MGPRLVDHLLYEPEDDGILWIRFNRPERLNALVGTAEENGTVAKVGEYMRAGDDDPNVRVIVLTGVGRAFCAGANLGSNRGDAGENFPGNRSAHEGLDGTRQHFFHAFTQLHLDIAKIRKPTIAMING

SEQ ID NO: 107223 - protein, 95 aa, Unknown
  Obtained from environmental sample
  misc_feature (1)..(95): Xaa is any amino acid
MPSDNNGPLAGIRVLDLTTVQMGPWCTRIMSDFGADVIKVEAPDGDSSRYTGVPRHRGMSGTFQHNGRGKRSIALDLKRPEARDAIRRLVPTVDA

SEQ ID NO: 107224 - protein, 79 aa, Unknown
  Obtained from environmental sample
  misc_feature (1)..(79): Xaa is any amino acid
MRKRRQSGRKKTEPEPEPEEPEEKPKRGRPNKVEPEHEPDEPEEKPKRGRPKKVEPEPEPDEPEEKPKRGRPKKADAES

SEQ ID NO: 107225 - protein, 161 aa, Unknown
  Obtained from environmental sample
  misc_feature (1)..(161): Xaa is any amino acid
KAGSFWVWCGLSGQKGLYREDFTLADIISSMPAFFTTETISSDAILNVETMDHGILKRKYQKNFTREWEEKKSFFMDTYGISSWNAIAYNGTEEKRGISSFAEADRGGLKIEFSDLSGETAAFIWMRGSGTEPVFRVMADAVGPDNSLERTLIERQRQIDA

SEQ ID NO: 107226 - protein, 65 aa, Unknown
  Obtained from environmental sample
  misc_feature (1)..(65): Xaa is any amino acid
DPTHVEPLIGRVLVASGWKPGFSTDYDAVLLAERFQADSVINLSNIEQVYTDDPKKDPHAKPIEK

SEQ ID NO: 107227 - protein, 82 aa, Unknown
  Obtained from environmental sample
  misc_feature (1)..(82): Xaa is any amino acid
VTDTEQIAFTYQGGIEAFFEKEVKPYTKDAWIDQRQTKIGYEISFTKYFYKPIELRSLEEITADIKALEAETKGLLEKIIED

SEQ ID NO: 107228 - protein, 88 aa, Unknown
  Obtained from environmental sample
  misc_feature (1)..(88): Xaa is any amino acid
VKAILAPLFADQRVAKYGQNLKYDIQVLARHGMLVNGIAHDSMVLSFLLGSASRHSLDHLSAVLLNIKPIEFESIVGKGKAQKAIRRG

SEQ ID NO: 107229 - protein, 160 aa, Unknown
  Obtained from environmental sample
  misc_feature (1)..(160): Xaa is any amino acid
AWLQWADKAGKGAFVIMRTSNKGRRDLEGLTINDESYSPLRLYNVVGNKLSELAASRIGAHGYGAFGAVVGADPQTEEERKEAAAIRAGRPNLFFIIPGYGAQGGAAQDAALLLREGNGGVVNASRSILKAWQNSHNGREAENPIAAQAARAAATKKRDS

SEQ ID NO: 107230 - protein, 169 aa, Unknown
  Obtained from environmental sample
  DOMAIN (47)...(139): Methyltransferase domain
  misc_feature (1)..(169): Xaa is any amino acid
MAKIREMFNQIHKRYDMLNHLMSGGRDIAWRKSCCKKLPPKKEAVVLDLCGGTGDFSLSYLKRAKNCRLPIVGDFAEKMLGEAAKKSSDLVPVLMDATQIPLANGSVDIVLNGFGMRNIQDLDLALSEIFRVLKKGGYFATLDFFKPEKKVAKLFYQRIAPLAIPFVGM

SEQ ID NO: 107231 - protein, 178 aa, Unknown
  Obtained from environmental sample
  misc_feature (1)..(178): Xaa is any amino acid
MSAFYHREDRAPWFSEYARRELDKLMYGSMDYYRDGYTVYTTLDLRHQEAADKFMAEGLTKANKEFARSKGRSNAQAERIYIPIVDLLTLTFGLNDIHSTSSSQNEQKSISRYTKTVNPIVDMAALAFGIPDLKVITNAGFGELKENPERNIVEGALISIENQTGYITALVGGSRYDE

SEQ ID NO: 107232 - protein, 204 aa, Unknown
  Obtained from environmental sample
  DOMAIN (106)...(148): Sel1 repeat
  misc_feature (1)..(204): Xaa is any amino acid
FPSFWQGKQSGKGEFIIWTRNPTTAKEQYELAQVYWYRNKNIRESNDWFKKAFELSMKDAGQGDAEAMYILSKILTRGPDGGVLDIQHDGIKARDWLFKAAEMGYAPAQYDIGYAYKCGWEHIGLYLLGNKNETKADYWLTKAAEQGHNIKAKYELGVDYYKGNGVPKDLEKAKHWLTLAAKDGDEKAKEALAKIDAGKPLDGC

SEQ ID NO: 107233 - protein, 166 aa, Unknown
  Obtained from environmental sample
  DOMAIN (2)...(166): DEAD/DEAH box helicase
  misc_feature (1)..(166): Xaa is any amino acid
LYSHQALAVDAVRSGRHVIAATPTASGKSLIYNLPVLEKFVIDPDARALMLFPLKALARDQLDAFAALTAHWPEAARPTALIYDGDTPDAARRKIRKNPPNVLISNPEMLHLALLPHHEQWTTLFASLAYVVVDEAHTYRGVLGAHMAQVFRRLARTHGRYGARPV

SEQ ID NO: 107234 - protein, 171 aa, Unknown
  Obtained from environmental sample
  misc_feature (1)..(171): Xaa is any amino acid
NDSLDTFERRRLRVKIMESSGISERTLRRYIQNYREKGYKSLEDIPRSDKDSLRAVPEVAIAEAVKLREEQPSRSVRRIIEILEGEKIVKPGEVSRTSLNRHLIQRGYGAAQLRAEGKAAQPSSRFERRRRNDLFQTDIKYGPTLVVTGVRKKTYLLPIIDDKTRMITHAE

SEQ ID NO: 107235 - protein, 267 aa, Unknown
  Obtained from environmental sample
  DOMAIN (76)...(199): Carbamoyl-phosphate synthetase large chain, oligomerisation domain
  misc_feature (1)..(267): Xaa is any amino acid
EPSIDYVVTKIPRFNFEKFAGANDRLTTQMKSVGEVMAIGRTQQESLQKALRGLEVGATGFDPKVSLDDPEALTKIRRELKDAGADRIWYIADAFRAGLSVDGVFNLTNIDRWFLVQIEELVRLEEKVAEVGITGLNADFLRQLKRKGFADARLAKLAGVREAEIRKLRDQYDLHPVYKRVDTCAAEFATDTAYMYSTYEEECEANPSTDREKIMVLGGGPPRIGQGIEFDYCCVHASLALREACYETIMVNCNPETVSTDYDTSDL

SEQ ID NO: 107236 - protein, 191 aa, Unknown
  Obtained from environmental sample
  misc_feature (1)..(191): Xaa is any amino acid
LDRLSNGRALFNLVTGGDPEELAAEGLHLNHTERYEASAEFTHVWRKVLEGETVDFAGKHIQVKGAKLLFPPVQHPRPPLYFGGSSAAALDLAAEQVELYLTWGEPPEQVKEKIEEVRAKAAAKGRTVRFGIRLHVIVRETTEEAWRAANRLIANLDDKTIADAQQAFAGFYSVGQQSMDALHGCKKDNLE

SEQ ID NO: 107237 - protein, 117 aa, Unknown
  Obtained from environmental sample
  misc_feature (1)..(117): Xaa is any amino acid
LDNKLKIKLSFEISQIDKLIEDGKPLLKLCKEKIPDYIEISAVALLLHSFYNGIENILILIFKNNKEEVTGEKWHSELLSKAFVSVANRKQIFKNELSEPLEEYLKFRHFIRHAYGF

SEQ ID NO: 107238 - protein, 136 aa, Unknown
  Obtained from environmental sample
  misc_feature (1)..(136): Xaa is any amino acid
GAEPPRHSGQGAPALLFDIGQWCSAQIPIGKVPLAFGEMIIGIITGLDGSGFSGLPLTGSLAAALAGPEGYNVQYLAAVGQMGAIWAGGGVLVPWCFGLAATAGIAGVDPRDLARANLVPVAIGLFVCTVIAIFMM

SEQ ID NO: 107239 - protein, 191 aa, Unknown
  Obtained from environmental sample
  misc_feature (1)..(191): Xaa is any amino acid
MAEKDPDYATVRRIQNLITAPEVDLVLNLHDGSGFYRPTFEDKNRNPYRWGQSVIIDMSVLDGRPLGDLEQRARKVVAEVNKALLQPGHSYHVMNTHTDKGHPEMEKTLSWFAVRNGKPAYGLEVSKEFTIPGRVYYHLNVVEAFLRLTGLEFERSFPLTFKGVRAALQNDLSVAFAYRFRLPLEDVRPRL

SEQ ID NO: 107240 - protein, 234 aa, Unknown
  Obtained from environmental sample
  misc_feature (1)..(234): Xaa is any amino acid
MDIAKNAMILAAVAALDLAVVNFPYVQNVPASQYYNPNHSAIQAIKNDSPNRFERSRIYSLTRNPAISGNNLASYGFRNALGFHDNEIATYRVFKEQLQNQAMIDIMNVGYIIFDGDRGTGVQKNPGDLGRARLYYNFEAMENQEQIIQKLKDNDFDYRNTLLLEDKNILPLQDGSGSLKIASAEMDELAFEVESSQKSLLFVSENYHPYWRAKVNGKDAQIYRAFSTFMAVEV

SEQ ID NO: 107241 - protein, 236 aa, Unknown
  Obtained from environmental sample
  DOMAIN (61)...(140): Bacterial Ig-like domain (group 2)
  misc_feature (1)..(236): Xaa is any amino acid
NASNQNVTWTNSNTAAATISATSGGTITVTPVAVGTTNITAASAADSTKTATCIVTVTTPAPTGVRLDRRSISLALGESDALVATVLPENTPNKNVTWSTSNANVATVSAAGVVTATGRGTATITATSVADPTKTAACEVTLVNVYVSSDYDNDTGAARILKNGSGSPLERLSSENLSYPSESNMVFVTESGDVYATGVTGEEIISQNRYVQCLRVWKNGLVHQTIRNEAFHDYSY

SEQ ID NO: 107242 - protein, 220 aa, Unknown
  Obtained from environmental sample
  misc_feature (1)..(220): Xaa is any amino acid
VAGAIYEFFGYRAEDNSDEALASAATYNCPFLAEICEKRLSDGIVSGVCSIKPATSSPVICCPIRLYADHYRILQEIANEVWGLDARIFPGRDARIKAMRSGDRVIAVFGKRWGGELRLPKKDGFGNYFVDWILALLGKNGNLVEFVAIEVQTVDTTGNYRNGRIELENESRGLIKTSAGINWENVSKRIIPQLIYKGQVLQRESPLNTVCILSAQNRYL

SEQ ID NO: 107243 - protein, 271 aa, Unknown
  Obtained from environmental sample
  misc_feature (1)..(271): Xaa is any amino acid
MLLQQTGYKFSGNNRLHIYLTTSLEEARAESKTPFGEWLSSEANEASHIKKDVPVMVILGNPPYSGESQNKSSSKEKNWIETKLDVYKYDDKNVKIPNTKWVNNDYVKFIRYGQYLIENNKEGILAYITDNSFLDSLSFKGMRYNLMQTFDNIYIFNLHGSSLKKETAPDGSKDENVFDIMQGVSINIFVKTKDSQNTNHIFYYDLYGKREEKYRFLLNNDLQTVKWQKLQPFMPNYFFVPKDFSLQEEYEKGFKIDEMFQINGVGIFLRE

SEQ ID NO: 107244 - protein, 190 aa, Unknown
  Obtained from environmental sample
  DOMAIN (3)...(53): D-ala D-ala ligase N-terminus
  misc_feature (1)..(190): Xaa is any amino acid
LPLERGAEAFRAPDVVFNAIHGAGGEDGQILGYLELLKIPCTGAGRLGLALAMDKWMAKRVWEAEGLPVVPYRAVSEEAWGRGAKDFLSQCLSLGLPLFVKPANTGSSIGIEKVKEADALSAAIENAFRFDRRVLVEKGLSVREIEVAVLGGDDPMVSVPGEVLVAGEFYDFADKYTDGKSSTQVPADLP

SEQ ID NO: 107245 - protein, 128 aa, Unknown
  Obtained from environmental sample
  DOMAIN (1)...(126): Transcriptional regulator
  misc_feature (1)..(128): Xaa is any amino acid
MRLGAKGRFAVTAMLDLAQNQEKNPVSLASISERQNISLAYLEQLFSKLRQNEIVQSVRGPGGGYVLGKNIREISVADIIFAVDEPLEVTHCDGDGNCQSAVASGCPECVTHNLWTNLHDLITDYLAS

SEQ ID NO: 107246 - protein, 65 aa, Unknown
  Obtained from environmental sample
  DOMAIN (1)...(65): Double-stranded RNA binding motif
  misc_feature (1)..(65): Xaa is any amino acid
MLLNEKTQELGLGTKKYELLEEWGEVHKREFRIAVNEDEKRLGKGEGFSKKQAEQNAAKEALERL

SEQ ID NO: 107247 - protein, 164 aa, Unknown
  Obtained from environmental sample
  misc_feature (1)..(164): Xaa is any amino acid
MSNIKNVPNPVDEVGEVNRAQIEHRATWMGLIYDEMKKAGIDAEPIIRRAIKRCGRIHGENIKKRCADQGNCEDFRKAFLSDLVIKTFDMRPINADRDSLSVDFHYCALISAWKKLGFDDKTCELLCDMAMDGDRGIAETMGLKFDLNQTIAQGCPDCKLHFQK

SEQ ID NO: 107248 - protein, 88 aa, Unknown
  Obtained from environmental sample
  misc_feature (1)..(88): Xaa is any amino acid
SINGVPETGTAGEPGTLTATVKPLFASNNSIIWNIDDAGTTGASISGNILNTTASGTVFLHARVANGVAAGLDYTQDFEIVFIEGSGA

SEQ ID NO: 107249 - protein, 216 aa, Unknown
  Obtained from environmental sample
  misc_feature (1)..(216): Xaa is any amino acid
MNVKKTKKIKIDDWLDTTPQKISWTVNLKKDVADNIVHEFNEIFLKISLYRPFTKMNLFFDTNFIERPGIWSNFLPTYNCDNIIICLSCVGISNGLSVMICKEMPNLHFIGDTQCFPLYWYKKKEKKQHNLFENSNDEYTRHDAISDFILEQAKTRYGGRLAKEDIFYYVYGILHSPDYRKTFANDLKKMLPRLPLVEKPSDFWASSEAGRKLADL

SEQ ID NO: 107250 - protein, 156 aa, Unknown
  Obtained from environmental sample
  misc_feature (1)..(156): Xaa is any amino acid
MLFIRGSLAVSNFRLSQFPVKGINAEYLHIAETTRDLNPEEHKKLEILLEYGTPSTNTNFNSQLIVAPRAGTISPWSSKATDIVHICGLSAIKRIERAVVWTFADGVPPESSLFDRMTEQIFHDKEELAALFTHNEPKPLSRISVLEQGKAALKKL

SEQ ID NO: 107251 - protein, 94 aa, Unknown
  Obtained from environmental sample
  misc_feature (1)..(94): Xaa is any amino acid
TYDMSGNVCEWCWDKFDAGYYKTCMDGPATYNKDPKGVGTEANTATINTTTPRVRRGGSWNHGSANTRVFIRDSYDPTAKDVWTIGFRVVRRPQ

SEQ ID NO: 107252 - protein, 260 aa, Unknown
  Obtained from environmental sample
  misc_feature (1)..(260): Xaa is any amino acid
MLNSDGFQQESYPENDWYNMPVERKNGKDGQPLKISVDLAGRQAVAQIWEVKVGRSSLYLLDTNIDENSQDIRNITSSLYGGDKEIRMQQEILLGIGGIRALRALGINPAATHMNEGHAAFLGLERIREIMEEKGFTFEEAREAVWPTNIFTTHTPVPAGNERFEIPMMEKYFRSWPQILGISWRDFLGLGRIYPGDERETFCMTVLALKMAAYANGVAKLHGVVSRDMWKGIWPGLPLNEVPIAPCDQRRTHKNMDSSG

SEQ ID NO: 107253 - protein, 60 aa, Unknown
  Obtained from environmental sample
  misc_feature (1)..(60): Xaa is any amino acid
MKRKEIMKKLADAGLFFVEGGNHTKVYDRAGSYLAPVGRHTEIKEWDVLKIEKQTGVKLR

SEQ ID NO: 107254 - protein, 80 aa, Unknown
  Obtained from environmental sample
  misc_feature (1)..(80): Xaa is any amino acid
MAHERHELKRVLGMKDILALAFGTMIGWGWIMLAGKWIEQAGVGGAIIAFAIGAVLCIFVGLTYAELTPALPLAGGELVF

SEQ ID NO: 107255 - protein, 184 aa, Unknown
  Obtained from environmental sample
  DOMAIN (1)...(184): Bacterial DNA polymerase III alpha subunit
  misc_feature (1)..(184): Xaa is any amino acid
MTRAFIGGTNSPKLIPRELDIKVKEAKEKSSQLRERYNSESDVKNILDIAERLEGIARNAGVHAAGIIIAPADLMEFAPLCKDKDDKVMVQYTKDEVEKAGLMKMDFLGLETLTQIAKVQSYIEKRLGAPMDLAQIHSFDDPKTFRLFSNGDTDGIFQFESPGMRRLLRSLQPDRLDDLIALNA

SEQ ID NO: 107256 - protein, 55 aa, Unknown
  Obtained from environmental sample
  misc_feature (1)..(55): Xaa is any amino acid
EVIDYVTEKYGRDRVCNIVTINKLKANAAIKDVGKVYDKSFHWRNELTKANSKGA

SEQ ID NO: 107257 - protein, 208 aa, Unknown
  Obtained from environmental sample
  misc_feature (1)..(208): Xaa is any amino acid
LLLIIGIIAAVLLLILLIFFISRRLGSSPNRVMASVSSSGGKEEKFSDHSKYLANYAAGQSKKRVTPYQDRPVKQQAGAHAAINPSGPLLLNLFVDDQSTSIGKRNIHSLKSGYSLSVGGGKSDDFHIFLVSMPSHLGDIRRNGSQLTFIPRKPKYFPDIGSNEVKECINKKIRVVSDKGYEMWFSFVTYEDPLEALNRVLHSIKVPG

SEQ ID NO: 107258 - protein, 107 aa, Unknown
  Obtained from environmental sample
  DOMAIN (36)...(103): Phosphopantetheine attachment site
  misc_feature (1)..(107): Xaa is any amino acid
GRTEKEAKAELRAMNDQDSSEDEDFEEDFAENELFKKMKKLIADKLEIHEGKITMESSFLYDLGADSLDQYELLYSAEEEFGIIIPDEKAIKFNTVKDAYEFIKSQL

SEQ ID NO: 107259 - protein, 64 aa, Unknown
  Obtained from environmental sample
  DOMAIN (4)...(63): CHC2 zinc finger
  misc_feature (1)..(64): Xaa is any amino acid
MSFYTDETIRQLKEATDISLVIEQFVPLKRIGGGKFLGLCPFHNDSNPSMNVNPHLGIYKCFAL

SEQ ID NO: 107260 - protein, 85 aa, Unknown
  Obtained from environmental sample
  misc_feature (1)..(85): Xaa is any amino acid
MDKLYVVIPAYNEEENIETIAYEWHDVVAKVNEQSRIAIIDDGSKDSTYVKLQKLQKDLPQLEAITKPNGGHGGTVLYGYQHALV

SEQ ID NO: 107261 - protein, 91 aa, Unknown
  Obtained from environmental sample
  DOMAIN (3)...(91): Pterin binding enzyme
  misc_feature (1)..(91): Xaa is any amino acid
MGIINCTPDSFFDGGRHCEPKNAFEHGLKLLDDGADILDIGGESTRPGYDPVSEEEELARVIPVIEMLAKEPSRKNFQISIDTTKANGGIL

SEQ ID NO: 107262 - protein, 281 aa, Unknown
  Obtained from environmental sample
  misc_feature (1)..(281): Xaa is any amino acid
IKQKLPCTQIAKMRSIVSYCLNPYNYANTKYALEDIKSFLKDPTFHGSIFWASDVNKEFYFDSGDHYTVDPEKESEYWYNMTLRGSDQGNININYNERMDQMKLWINMPVYDDNNKAIGLVGTGVDLDDLRLELSKDVGENIGFYMFNKDGEITITKDKKDSQLIRDKRKIFDVLRNDGIFIKKLATTASIESIDEPFEDVAENVLAYALTRIPMHEEINWYCIVYEPVSFMDIMSNKMTLLFLAFFGIILLMFAFTFIIVFGLINSLYKNIDSARFAQKP

SEQ ID NO: 107263 - protein, 168 aa, Unknown
  Obtained from environmental sample
  DOMAIN (1)...(103): Histidine kinase-, DNA gyrase B-, and HSP90-like ATPase
  misc_feature (1)..(168): Xaa is any amino acid
LLTNAIKYRNEGSVELKVRCERENDTVWINAAISDTGIGISEEAMKDLFQDYHRIDSKSNHHVEGTGLGLSITKKLVEMMDGEIKVESEIGKGSTFSFRIKHAPVGDAVLGADISDKLRNFCYTDDKRVVSQKLVRIDLSYAKVLVVDDMTIYPDLVSGILSSYKMQV

SEQ ID NO: 107264 - protein, 99 aa, Unknown
  Obtained from environmental sample
  misc_feature (1)..(99): Xaa is any amino acid
MKKVLTIIVVIFVVFIGIVVAGPLYVINEGEQAVIVQFGRITNVVSNAGLKVKVPFIDEVVRYPKKIMAWDGEARIVPTAERQFIFVDVVARWRITAPK

SEQ ID NO: 107265 - protein, 170 aa, Unknown
  Obtained from environmental sample
  misc_feature (1)..(170): Xaa is any amino acid
MTTSYFSYTIVGKKGEEQTITITAYKGKNPEVKIPPQIGKLPVTVIGSAAFRRKNLTSVIIPDGITTIEANAFFANNLTTIKIPYGVTSIGENAFASNKLTDVFFSDGLETIGKTAFKDNLITNLTIPFGVDEIGDEAFMNNQLVSLYIPPTVYVVGNGVFANNRLINLK

SEQ ID NO: 107266 - protein, 179 aa, Unknown
  Obtained from environmental sample
  misc_feature (1)..(179): Xaa is any amino acid
MLEIKNIEITPQMLSITSELDAFKANWTGFSSMQPEQLKKLKKISTIESIGSSNRIEGNKLSDKEVELLMSRIQKKSFKNRDEEEVAGYAELMNLIFDSYEVIPLTENYIKYLHKILLQFCKNDASHRGEYKKLSNSVSAFDANGKEIGVVFETASPFETPMLMEELVNGQEKISTIIF

SEQ ID NO: 107267 - protein, 229 aa, Unknown
  Obtained from environmental sample
  misc_feature (1)..(229): Xaa is any amino acid
VFGIIDWFVLAAYWGFSIFIGLYAARGNRSFKDYMLGGGSMPWIPVGISLIATSVSATTLLGVPADVFDVDMSLIMTNVGSFLSILVVGFLFIPRFRKCGIQSAYELLEKTFSRSVRRVAAIFYAMHLVLRTGILLFAPSIVLSSILQIPVWAAILISSFAAILYTWHGGFKAVVWTDVMQFLVFFGGGVFALFVLAKGIGGFGELATLAAESKTFNWFNGSLDPSNAR

SEQ ID NO: 107268 - protein, 237 aa, Unknown
  Obtained from environmental sample
  DOMAIN (148)...(181): Tetratricopeptide repeat
  misc_feature (1)..(237): Xaa is any amino acid
LNKREFILLLAGVSAVILIIVLCGIIFTREKKDTQVKQIEEPLITDETEEEEISITESENNTQALESRMVSRPLSSLSNLSRLRGMGVLVSEIDPVNFENPDLDILKQMGADPYLISYLAGEQFYRNSDFDKAIQEFTASINRYSGFTQSYISRGNAWLKKREYSRAIDDYTQAIKLDGKKAEVYNYRGFARAELAARNKFNGINLAIEDYTHAISINKNYVDALVNRSYAYYQTGD

SEQ ID NO: 107269 - protein, 176 aa, Unknown
  Obtained from environmental sample
  DOMAIN (10)...(170): AIR synthase related protein, N-terminal domain
  misc_feature (1)..(176): Xaa is any amino acid
IPRLDEPFRLPVTYASSGVDINRQDEAIARIKPLAKATKTAGVRSDLGLFGGLFSASFSEPRPLLVASMDGVGTKMKVARLAGVWDTVGADLVNHCINDILVQGARPLFFLDYIAAQRLEPEIIEQIVKGMAGACSAAGCALIGGELAEMPGVYTSGEVYVAGTIVGLVDEGDLLP

SEQ ID NO: 107270 - protein, 249 aa, Unknown
  Obtained from environmental sample
  misc_feature (1)..(249): Xaa is any amino acid
AALPAYEYLKTDFPQLAAVARLASPGPRGTNRITLSSGEQSGFVYSLFADPEILKIFHLKLLAGDPNEPFKASGKDSGTAITASAARRIFGSTDVLGRRVMFAGRDPAVISAVIEDLPQPSHLGDSDRAVLRFDTLSRMDPSRLFDATDWTATQAFIYLLLPADGSLSVAALRASLKTFGERHEDRTTGHSRFDVVPVAAVRQLILDRMLADTGFSLTSSLYFLDTLVLIVACFNYANLATALAIAPLA

SEQ ID NO: 107271 - protein, 96 aa, Unknown
  Obtained from environmental sample
  DOMAIN (2)...(79): Ribosomal protein L19
  misc_feature (1)..(96): Xaa is any amino acid
MSKIVKELEAERMVRKDSNGKPVAVPDFKPGDTVVVQVKVADGDRVRDQAYESVVIAISNRGLNSSFTVRKISHLKAWSAFPDLHPRDQVGPLEST

SEQ ID NO: 107272 - protein, 138 aa, Unknown
  Obtained from environmental sample
  misc_feature (1)..(138): Xaa is any amino acid
MTIIVMGTFFIVIWFGTTFFILRYVKRLKDDLHGKFSDKEKPQEEKSEYDENNVNQRLIKPFEFIKHFDANRLLIFIKQEHPQVIALILAHLEPDKASFILQNLPCELRNDVFRRIADIGRVNPEKISEIEQVLEKNP

SEQ ID NO: 107273 - protein, 98 aa, Unknown
  Obtained from environmental sample
  DOMAIN (2)...(69): Surface presentation of antigens (SPOA) protein
  misc_feature (1)..(98): Xaa is any amino acid
VMKITVELGAAYKTVKEVYGIGEGTVVELDKLAGEPLDVKANGIVIAKGEVVIIDENFGVRITEITGTHDTSGLPDWPEQPMPSFTGSDGTKTDGESK

SEQ ID NO: 107274 - protein, 164 aa, Unknown
  Obtained from environmental sample
  misc_feature (1)..(164): Xaa is any amino acid
KDKDKADGGTSFGIRIGLNFSHTLAETPYKAGDYGDIGGMQAGFVIDFAPSSWFHIQPGFMYIQKGMKDGDDSDITAHYVELPLLLSIKLAALRLNAGPYLGLCLDNNSIYNDKPDIGLSYGVGFDIGMFYIGAFYDYGLTDVSNIGGSNFYNRTLGFNVGINL

SEQ ID NO: 107275 - protein, 242 aa, Unknown
  Obtained from environmental sample
  misc_feature (1)..(242): Xaa is any amino acid
KGRGCDGFRVDMADSLGKFDNNEKSATSAIWRNIREMLDGEFPEAAIISEWSSPPLSLKAGFHADFLLDHGTSGYRSLVRHYEDGGKDNSYFKKDGTGSITRFLDQYMPWYEATKNDGFISMISGNHDTPRVSHGLSTREVSLFYAMLFTMPGVPFLYYGDEIGMRYLYKLPTKEGGYSRTGSRSPMQWNSGANVGFSNAAPEKLYLPVDTEGGAPDVESQEKEPQSLINTVKDLLRLRNGN

SEQ ID NO: 107276 - protein, 52 aa, Unknown
  Obtained from environmental sample
  misc_feature (1)..(52): Xaa is any amino acid
MSNQENLELIELFKRLRVTDVRDGMDWMGYHHYGTVDYSIRPLFRPEPSIIG

SEQ ID NO: 107277 - protein, 163 aa, Unknown
  Obtained from environmental sample
  DOMAIN (38)...(163): Bacterial transcription activator, effector binding domain
  misc_feature (1)..(163): Xaa is any amino acid
VDWLDKFIAVIDYKEKGAKLKAYARLSFQITIRGDVEMEYRIENINFKARFVGKEFQVKTSNAFRKIPELLRKAKKDGFQQQLIDLSWKNPKCSLQSLVGVCGTEAAIMDEEFAYFYGIRYDGKIPEDMEELIIQPCVYAVFPNVVEAWKRLYSEWDPLESTC

SEQ ID NO: 107278 - protein, 94 aa, Unknown
  Obtained from environmental sample
  misc_feature (1)..(94): Xaa is any amino acid
MGIPELGICHDIAVKNGKGEAEISVKPELWSPENPKLYDVIFSYNAGSYVDSTRDRIGFTTISVNAHEIFLNGRKIFLSGVCVHDDHFASGKTA

SEQ ID NO: 107279 - protein, 241 aa, Unknown
  Obtained from environmental sample
  misc_feature (1)..(241): Xaa is any amino acid
INKDDGLYYDATEDGEDFKICTPLCVLAKMRNPDGLGWSRLIEIQAPDKIKKRLCLPMRDFNSRGDAIRALLLDAGVEISPHPKAFTHLLDYLTSGSPDDSFWTLASKIGWVGDDAYVLPDGQFGSKPSEKIYFQGDTGSLHKSAGTLEEWRRHVGAYCCGNSLLILAVAYALTGPLLKDFGMEGGGLHIYGKSSSGKSSCAIVAGSVCGGGHKGYLRQWRATHNALESTATMHNDNLMIL

SEQ ID NO: 107280 - protein, 90 aa, Unknown
  Obtained from environmental sample
  misc_feature (1)..(90): Xaa is any amino acid
GNYSLIFLRPKTGRTHQLRVHMRFLGHPILGDSVYGHGDKEFKDVSLMLHSKKLEIALPGEEKERVFSSNIPGRFMEIMKKLDREFSGNG

SEQ ID NO: 107281 - protein, 166 aa, Unknown
  Obtained from environmental sample
  DOMAIN (14)...(130): RNA pseudouridylate synthase
  misc_feature (1)..(166): Xaa is any amino acid
MDNNVPFIVDETDDFAVVFKPSKIHSIPLKKKNSETLFEWFASQSSSVFDLMHRLDFETNGLVLFAKNAESYDFFKTLQNNGGFIKEYSAVCNNAEYQGVDSGGGYPKPPILYIEDYKPSLKEPLVIESYFPPFGAGRKLVRPVTEIKKHREIAADKGDFYRTEII

SEQ ID NO: 107282 - protein, 239 aa, Unknown
  Obtained from environmental sample
  misc_feature (1)..(239): Xaa is any amino acid
ADALSLNTATAAAPKYITLFAGAATDGNAAFFFDGAMEILNPYIDKGVLKVVGPYPKTSKDKANYMRIATEGWWPNVAKARMEGLLINDAANVTLDAVLSPNDTIARSLIEALKADAKYRGKLPVVSGQDAEFLSVMSIKNGEQYMTVFKDTAKLAEAAALLADQLLKGVKPANIKIPGAVLAAGNLRAIGDTTKQGEFKNGKVVTTFLLDVVPITKDNVRVPADAGFFTDAEAAQIRQ

SEQ ID NO: 107283 - protein, 299 aa, Unknown
  Obtained from environmental sample
  misc_feature (1)..(299): Xaa is any amino acid
KSKKQDLQLIFQDNVSAKTLGYVTAWYIKAAQYIQNTNIRTAFVSTNSICQGEQAIILWNGLMNKYNIKINFAHQTFKWSNEARGMAAVYVVIVGFAVNDTNKLLYIYDDVKGEPNIFVPKMINHYLIDAETIFISKRSQPLQKDTPLMNYGSEPREGGFLLLTNDEKDDIIKNEPYLKKYIKQFVSSDDFINNIKHYCFWLVDAAPSDIKKSKELVSRLKKVQNFRRNSKQKQAFASAENPSLFTSIRQPKSSYLLIPIVSSENRKYIPIGYMDKEVIASNANFTISWDPLESTCRHA

SEQ ID NO: 107284 - protein, 237 aa, Unknown
  Obtained from environmental sample
  misc_feature (1)..(237): Xaa is any amino acid
MDKYVHWSQTKLLSDIMTSGFSENDACFINWEKLTKKGNNALKNSERTNFLEYIEKAHNEGLAFKIIVDESHQNDTIKSDDILSFFNSDKIIRTSATPKGYKDAKLIEVKEEIVISQGLIKKVLIINEGFSQNIHVKDQIHYLLEKAFAKRAEIYSQMQTIGKEINPLIIVQLPNKNEDLQDSVVQYFETQGITYDNHKLAIWLAKEKENLENIKDNAASPVALIIKQAVATGWDCP

SEQ ID NO: 107285 - protein, 44 aa, Unknown
  Obtained from environmental sample
  misc_feature (1)..(44): Xaa is any amino acid
MLGLFSCNIGIDLGTANTLVHVQGRGIVINEPTVVAVDRKSEKV

SEQ ID NO: 107286 - protein, 144 aa, Unknown
  Obtained from environmental sample
  misc_feature (1)..(144): Xaa is any amino acid
MDQATTDLSARMGECFAESAASVFSMLTGREFTVTPGEGQIFDYGNLASNLPPDSIFVKTAYTKGASGGIFFSMPLKESTILVDLMLGGDGTPSDSLAGDSKDALSETFNQVMGSANQTLSDQAGETLSISTLEILELGTIDAA

SEQ ID NO: 107287 - protein, 117 aa, Unknown
  Obtained from environmental sample
  DOMAIN (1)...(109): Protein of unknown function (DUF1524)
  misc_feature (1)..(117): Xaa is any amino acid
MPQKWEEYWSNVPFYDETNNIIVDQELGKAARYKKIYYIGNMTLLNSRLNTSLRNYEYQRKIEGEGRKKGIRHYSDLFITKIDIISKYDNGNNIWDERSIIDRTKKLGEEILKIWKI

SEQ ID NO: 107288 - protein, 171 aa, Unknown
  Obtained from environmental sample
  misc_feature (1)..(171): Xaa is any amino acid
KKLYRNGKFVEQKSKQYYEEEDKQFMADRYIVDTCPKCGNENAYGDQCEKCGSTVSPRELINPRSMISGNQPVMRETSHWYLPLDRYEEWLREWILEQHKEWKTNVYGQCKSWIDGELQPRAVTRDLDWGVKVPLSGAEGKVLYVWLDAPIGPISNTIELMPDAWEKWGKM

SEQ ID NO: 107289 - protein, 222 aa, Unknown
  Obtained from environmental sample
  DOMAIN (25)...(196): DNA gyrase B
  misc_feature (1)..(222): Xaa is any amino acid
LNKGLEILCVDERLEEKHLFRAEGGIPQFVKDLNSGEGGIHAVISAEGRFENVMVDFALQYNAGYKENVLAFANNIRTKEGGTHLGGFRTALTRAVNGYIKSQADLSKKFKGTVLSGDDVREGLTCVLSVKLPQPQFEGQTKTKLGNSEITGIVAGIVYERLNTHFEENPKDARLIIDKAADAARARDAARRAKELVRREGALSDNALPGKLRDCQSQRTRG

SEQ ID NO: 107290 - protein, 167 aa, Unknown
  Obtained from environmental sample
  DOMAIN (102)...(135): Tetratricopeptide repeat
  misc_feature (1)..(167): Xaa is any amino acid
LGKAFLADKRDEQAYREYKSANRLGISGKNIPETAFRETLAALYVHLHEPEEALKEYISLIKLFPENPEYYFNAGRIFNTRNRSDLGEQYLKKSVSLNPKEIRYHYELGMLYYLAKRIKEASQEFEAALKLNPNDASSLLYMGKIFKDANKFTDAIPYQEKAARDQE

SEQ ID NO: 107291 - protein, 220 aa, Unknown
  Obtained from environmental sample
  DOMAIN (158)...(220): Prokaryotic transcription elongation factor, GreA/GreB, N-terminal domain
  misc_feature (1)..(220): Xaa is any amino acid
MPFIITHLVKEGYENKLTVMCNDVFENFRDNREALVWLYKNSKNTDWFKAANIGVEKQLISLIHILDITYRDIENHKDTVENRKINKLVYNTLFKDGELTSFIDTSDEDTIIRLFTFINDVKDLDPQDKLNLRSRILDKHPDFKFFGDAEKKVSRGLMVTQSMYEEKKKQLTHIMDEEVPANSKEIEYALSLGDLRENAEYKAAKEKQEQLNSQIAKLKE

SEQ ID NO: 107292 - protein, 258 aa, Unknown
  Obtained from environmental sample
  misc_feature (1)..(258): Xaa is any amino acid
DADKLFYESIKKNDQEFDKEYKTKFTYYLNAESDKTVKYGLESIEHLLPITLAFNKEFKSIEIFNCGKKQKYYKLKLSDRENISQYKISISEDDKEVIEKYIYVLEEKNHSFCTFTEHKNDCDYLLPMLMCYPRLFLWFPLIGTEHIGLPIIINSKEFDPHTERNAIYLTEDSKTYEKNKSILIKALEDLPKFAEYLKEKGVRNLLNLLAFDSNNDDWINQDWFNDINKQILGKMINLPILSLGDLSSNPYKLVDFII

SEQ ID NO: 107293 - protein, 223 aa, Unknown
  Obtained from environmental sample
  DOMAIN (53)...(183): Glu/Leu/Phe/Val dehydrogenase, dimerisation domain
  misc_feature (1)..(223): Xaa is any amino acid
MKTNEVMATLEKKYGHEKEFLQAVREVLESIEKVYNEHPEFERAKIVERIVEPDRVFTFRVAWQKDNGEVQVNTGYRVQFNNAIGPYKGGMRFHPSVVLSTLKFMGFEQTFKNALTTLPMGGAKGGSDFDPKGKSDAEIMRFCHAFVAELWRHLGPDTDVPAGDIGVGGREVGYMYGYYKKLARENTGTYTGKGISWGGSLIRPEGTGYGNIYFLLEIIEQET

SEQ ID NO: 107294 - protein, 249 aa, Unknown
  Obtained from environmental sample
  DOMAIN (1)...(249): tRNA synthetases class I (I, L, M and V)
  misc_feature (1)..(249): Xaa is any amino acid
VVDRLRSVGALLHEEKLQHSYPHCWRTKTPIFFRATEQWFITMDSPIHGGKSLRELGIEGVETTKWVPSQGRNRIHSMISGRPDWCISRQRAWGTPITVLRCSDCGEPLIDANVFETAAKAIELGGIETWSELPLEGLLPKNATCAKCGSKQFQKETDILDVWIDSGVSATIVAQTHPEIRPEDYGSFIYLEGSDQHRGWFHSSLLFNLAVNGKKPYDTVVTHGFLLDGKGQKMSKSPGNAIEPDEVVK

SEQ ID NO: 107295 - protein, 65 aa, Unknown
  Obtained from environmental sample
  misc_feature (1)..(65): Xaa is any amino acid
MSLPRWPLLPLAPFYAIAVRAKNHAFDANPEKAERVPRHVLSIGNLSVGGTGKTPMALHLAQELD

SEQ ID NO: 107296 - protein, 231 aa, Unknown
  Obtained from environmental sample
  DOMAIN (130)...(231): tRNA pseudouridine synthase
  misc_feature (1)..(231): Xaa is any amino acid
DFCGWQRQESERTVEGVIEDALEKMHGHPVNLTGSGRTDSGVHAVGQAANFYTDIESIPAGRFAPALNSSLPHDVRVLESCETDGEFHARFSAKARTYRYQFICRPLLPHESRYNLQLRRFPRLELLNAHGRLLLGETDCSIFAGAGDTSASKNRYVYKAYFYAERDSLIFEICANAFLRNMVRSVAGTFLHYEETATPPDKLREIIATGERSLAGPHMPPQGLFLWQVEY

SEQ ID NO: 107297 - protein, 231 aa, Unknown
  Obtained from environmental sample
  DOMAIN (37)...(130): Divergent AAA domain
  misc_feature (1)..(231): Xaa is any amino acid
MEIIELLDLLARGEDSTRQFKKDVTNADSLAAEMTAFSNGSGGKIFIGINDDGTIAGLTNEDIRRINQLISNTASQNIQPAINPVTENIKTDDGLVMLVDIQAGINKPYQDKNGVFWVKSGADKQRVTSREEIQRLFQKSNLIHADEIPIPGVTVADLDLDYFKNYFQDRFGETLDKQKLPLPKILDNMNLFKDGSLTVACTLLFAKTPQFKLPAFIVKTGAFDANELSTI

SEQ ID NO: 107298 - protein, 67 aa, Unknown
  Obtained from environmental sample
  misc_feature (1)..(67): Xaa is any amino acid
RAWTWDEFVATAGELTFDTNGRTPNDAGFNRNQIKQYGAMVETLTWQLEVWALSNGGGFYSPDGKTL

SEQ ID NO: 107299 - protein, 253 aa, Unknown
  Obtained from environmental sample
  misc_feature (1)..(253): Xaa is any amino acid
AGRIRIIELGVDSEGKLIGRPDDRELLIYFQEYNIALRFRKNVQHFELYPEAFFDNKIVPITVGREPAFLNISIQDKPVELKGSTVATETDQQQLTVDNSISFNINGNNNSVNLSQKTGNVNGNYLLPTPNYFIEGNGSVTENGIIAYVSSKKGTLSNNDRAIIRKYIEEAKFEGINSDIAIAQMLHWTDFLRNQQRITTNNYGGLSRIGNFNGRFNNMTEGVRAHIQHLKLYSNPKVKGQLVDPRYSGLRDN

SEQ ID NO: 107300 - protein, 44 aa, Unknown
  Obtained from environmental sample
  misc_feature (1)..(44): Xaa is any amino acid
MATTADLVIAEVEEIVEIGELDPNVIHTPSIFVDFLVKAEQLEA

SEQ ID NO: 107301 - protein, 246 aa, Unknown
  Obtained from environmental sample
  misc_feature (1)..(246): Xaa is any amino acid
MTQEQFGEYLGIKIDQIRQLEDNQEEIPYIVLKTLADKTGMTIGEIKDHKRPEFEFSDSDKAWSSANHTKKTLVDYINDFSNNRQKDWGDYYRNYIGELNICVKNALEKPKIAVVGHSDVWNSTLINYILGSAKMSDKRTPVTSIVVYIKHINDRPDFIKDEVWIFKFDEKYAWDENRLDDKNYCTGLKIAGGGIELLKSNKNYKGNYKKNELISAVVFIDSDILKNCDIIDLPDFGTGNKKEPDF

SEQ ID NO: 107302 - protein, 89 aa, Unknown
  Obtained from environmental sample
  DOMAIN (6)...(45): Ribbon-helix-helix protein, copG family
  misc_feature (1)..(89): Xaa is any amino acid
MTIDIERTVRLTADDAARIDRLVASGQYPDEAAVISDAIDALVEYDEALDKWLLDVVAPVYDDVAAGYGTFLTPEQVLANIEARRLAAS

SEQ ID NO: 107303 - protein, 252 aa, Unknown
  Obtained from environmental sample
  DOMAIN (2)...(252): PEP-utilising enzyme, TIM barrel domain
  misc_feature (1)..(252): Xaa is any amino acid
MEGKYIRLNANIERYEEASEITSVGASGVGLYRSEFLYFGRNALPTRKEQAEAYSKVVNQLDPLPVTIRTLDAGGDKMLSLVNAEIESNPFMGWRSIRLCLDRKDIFRTQMKALVEAGSRGNLKIMFPMISSIGELEKAKEIYEECCAELRAEGLPITKVELGAMIEIPSAVIIIEEIAKRVDFLSIGTNDLIQFTLAVDRSNGKIASLYEPHHPAVLRSIKLVVEAAPKEGIPVSVCGEMAADPLSTLLLV

SEQ ID NO: 107304 - protein, 81 aa, Unknown
  Obtained from environmental sample
  misc_feature (1)..(81): Xaa is any amino acid
TSNKGTPVEITIGVKHMPREISLETETSKEELHEMLRLALEQGGVVTLTDSRGREVMIPAATIGYIEIGPEETRRVGFGSL

SEQ ID NO: 107305 - protein, 74 aa, Unknown
  Obtained from environmental sample
  misc_feature (1)..(74): Xaa is any amino acid
MEERILEIVNTIRLYKGLNTLSTIQPENNLHADLEFTSLDLAELTVRIEDAFDIDVFEDGIVNTVGEIYQKLSK

SEQ ID NO: 107306 - protein, 164 aa, Unknown
  Obtained from environmental sample
  DOMAIN (1)...(164): Dehydratase family
  misc_feature (1)..(164): Xaa is any amino acid
IARGSRSPEASERFLAAPGRKFNLEAYSQNTKYPSHDLDREKGAIRNLANAYSKDGGLAVLYGNFALNGCVVKTAGVDSSIWKFTGPAVVFESQEEASEGILNRKAKKGDVVIIRYEGPKGGPGMQEMLYLTSYLKSMGLGKECALVTDGRFSGGTSGLSIGHR

SEQ ID NO: 107307 - protein, 245 aa, Unknown
  Obtained from environmental sample
  misc_feature (1)..(245): Xaa is any amino acid
NPKDNPFKLDIVYTATITLTTKAGYILQGVPANFFNVAGATTVSNVADSGVITVVFPPAINVINSIAELQTYLSGLPANTTAVYTVAVNVNDLGGAWNTSGSVGNVLYNNNTKYVSLDLSGSTFTTIGDDAFGRCTSLTSIIIPDSVTSIGSFAFYNCTSLVGIIIPDSVTSIVNDAFYDCTNLIAINVASSNGAYSSADGILYNKDRNTLIKCPIKKTGIVTIPNSVTSIGSTAFHSCTSLTGV

SEQ ID NO: 107308 - protein, 167 aa, Unknown
  Obtained from environmental sample
  misc_feature (1)..(167): Xaa is any amino acid
WAEEENRKRRTLAYFPVSEWELVLGRFLSVISCLVLMLLLTLPIPFTVMPLGLFDAGVIFCEYSGAFLLGASACALGLMFSSLSKNQAGSFLASAVVLMIVMLANQLTYLQNLPQWLAGFINYFSLSFHFESFSKGLIDSTDLAFFIVSTVLFLFINTRVIMFRKWR

SEQ ID NO: 107309 - protein, 132 aa, Unknown
  Obtained from environmental sample
  misc_feature (1)..(132): Xaa is any amino acid
GRAAVDIRSHTIIYQVTEEITNAMVGLLDATEKEVVHGHAEVLQLFKVQKSVIAGCRIQDGAVKRSHLVRAKRDAELLFEGHIKALRRFKDDVAEVKTGFECGIQIDGFDAIAEGDTLEFFTKEKVAATSLN

SEQ ID NO: 107310 - protein, 85 aa, Unknown
  Obtained from environmental sample
  DOMAIN (1)...(62): Bacterial  dnaA  protein helix-turn-helix domain
  misc_feature (1)..(85): Xaa is any amino acid
VSDYFRIEESSILSNTRKREIVTARQVAMYFAKQLTKTSLKGIGAQLGNKDHATVLHAYRTVNELMIDKKFKMQIDELEEKLVNA

SEQ ID NO: 107311 - protein, 77 aa, Unknown
  Obtained from environmental sample
  DOMAIN (3)...(64): FabA-like domain
  misc_feature (1)..(77): Xaa is any amino acid
VTLDIPNPEEKVMYLVSIDGVKFRKPVMPGDQMVMEVKILTLRGNVAKMRGEAFVDGAKVAEAEFMSMVADAKGKAE

SEQ ID NO: 107312 - protein, 202 aa, Unknown
  Obtained from environmental sample
  misc_feature (1)..(202): Xaa is any amino acid
MMILEGFIAMVWAAAAMAIINKGDGSDSATAMVGIISRDMLGPVGGLMAIFGAIVLPITSGDTALRGLRLMVAEKFSIDQKPKAARLNVSLPIFAVVAAILVWAKFSPRGFTILWRYFAWCNQTIAIFAFAIIAIYLLGRGHKWASLMALAPGAWYAFVTFSFICNASIGLNIPMHISYILGAAFALAYAVVVYRHGCRVRG

SEQ ID NO: 107313 - protein, 173 aa, Unknown
  Obtained from environmental sample
  misc_feature (1)..(173): Xaa is any amino acid
MDDFLLDGSKQPDTELLDTTFAPQSSLSANNNGHNDYFIFNDIRNGPTTVHSWDILPTSKRQKDICLMLLKNRRKRSYGPLDGNPLSLKQFQSLDSSISQVELGGLVELGILKMEKYSFAILDSHAPSCDLDDAEKLVLSKQECGAIVPDKLVCDRDIKKQRVRVFNTLGSLE

SEQ ID NO: 107314 - protein, 184 aa, Unknown
  Obtained from environmental sample
  DOMAIN (1)...(119): Beta-ketoacyl synthase, C-terminal domain
  misc_feature (1)..(184): Xaa is any amino acid
IREVGASSDGREAAIFAPTVQGQERAIRNTFEAAGIDPGTVELVEGHGTGTSVGDTVEVEALTRVFNQSPRATKNRPWCALGSVKAQIGHAKAAAGAAGLIKAALALHHKILPPAVKVSRPLAVLNQAASPFHLSARARPWVSSGKQPRRAAVSAFGFGGSNFHCLLEEADPAQKAPPAPSFEL

SEQ ID NO: 107315 - protein, 92 aa, Unknown
  Obtained from environmental sample
  misc_feature (1)..(92): Xaa is any amino acid
IRDSRFRNTLNPYITGSANSLAGLLSGSLILEIIFAYPGIGRLMYEAVMQQDVNLVLANLMFISFLVLLGMVISDICLALVDPRIRYGKEGS

SEQ ID NO: 107316 - protein, 105 aa, Unknown
  Obtained from environmental sample
  misc_feature (1)..(105): Xaa is any amino acid
LLKDKQLNFVACGLQSAYVSENAPEAFVALMAKHYHRLKPVKDYQEIDDVLFKFSLNLPDEQIPLVIDKLHVALDGIMNPVTSGFGFIDLIIPGKQKPNGISRLL

SEQ ID NO: 107317 - protein, 148 aa, Unknown
  Obtained from environmental sample
  misc_feature (1)..(148): Xaa is any amino acid
MPEIVQEPLVPEEKKEAQPIQGQNYLSETVNAFTEIAKSGGGEMIYSSGPDHTIELIRNVLSAEKGKNLDLVICLDTTGSMRKYINAVRAKLIPMLSEMLPNFPSFRIGLVLYKDYRDSYLTQIVPFTDDFSKFQRDLNDIRVTGGGD

SEQ ID NO: 107318 - protein, 174 aa, Unknown
  Obtained from environmental sample
  misc_feature (1)..(174): Xaa is any amino acid
MREKEIKSDLRTWGCFPKVNVSINKKHKLGPKTVDCIFLGYSFHSVGYRLLVIKCYVPDMYVDTIMESRDAAFFENEFPVKNTPSETSHETIIPHEHELSIPIDHAEDPHMHIPEEDDSIVTRKSKRQRVAKTFGDDFIVYLVDDTPSTIKEAYSSLDADLWKEAVRIEMDSIM

SEQ ID NO: 107319 - protein, 72 aa, Unknown
  Obtained from environmental sample
  DOMAIN (5)...(62): Phage Tail Protein X
  misc_feature (1)..(72): Xaa is any amino acid
MGDCLTHRTKDGDRWDLLALVYYGDPLHLGPLLRANPAHAAKATLEENLLLRVPIIAKADTAPKQTPLTAWR

SEQ ID NO: 107320 - protein, 90 aa, Unknown
  Obtained from environmental sample
  misc_feature (1)..(90): Xaa is any amino acid
LAQSDPQAFLQKYSPPVAIDEVQYAPGLFPYIKIWVDERRFENKGGGKKPSNSAGAFWLTGSHKFALMKGVKESLAGRIAIIDLLGFSYL

SEQ ID NO: 107321 - protein, 58 aa, Unknown
  Obtained from environmental sample
  misc_feature (1)..(58): Xaa is any amino acid
MYEIMKALYDIGFNGPLRPDHGRNIWGEVSMPGYGLYDRALGLTYLSGLLEAIRKSQC

SEQ ID NO: 107322 - protein, 200 aa, Unknown
  Obtained from environmental sample
  DOMAIN (5)...(166): AIR synthase related protein, N-terminal domain
  misc_feature (1)..(200): Xaa is any amino acid
MPSTRSKAYTDAGVDINTGNALVSRIKRLAAATRIPGVYSDIGGFGGLFRPDMSGMADPVLVSSTDGVGTKLKLAFTFDKHDTVGIDLVAMSVNDILVLGATPLFFLDYLAMGKLDADRAEAVISGIAAGCRLAGCALLGGETAEMPGMYAEGEYDLAGFCVGIADNAAIIDGRAIIAADAVIGLASSGHKANGYSLIGK

SEQ ID NO: 107323 - protein, 255 aa, Unknown
  Obtained from environmental sample
  misc_feature (1)..(255): Xaa is any amino acid
VMGDNNAALFLEKFALLKDESSLSDFSDPILINMDNKHIFDSSRLEDHHALIPLDKIPESAGDKERKVYSIVLESFFIVCMNDYVYNEKSLQFHISTYLFSSKIRETIQKGWKQTVQEQKNENDEEEEEEVPFFDESACSLSALKILEKLTKPNREFAIDTLLAFMEHPKSSADDGLKLSGLGTPATRAEIIKKLFSGRYLREDKKGLFVTERGLFLLKALIKNAHLKKMADVSQTTEWENSLVGSSRVDLQACK

SEQ ID NO: 107324 - protein, 80 aa, Unknown
  Obtained from environmental sample
  misc_feature (1)..(80): Xaa is any amino acid
MMNTPPTPLTNLLDAAAIGRSEGLRFVYVGNAPGQNNATLCPDCGQTVIARRGFQAEPVPGFQGACPRCGARIAGFWRLA

SEQ ID NO: 107325 - protein, 44 aa, Unknown
  Obtained from environmental sample
  DOMAIN (1)...(38): Bacterial regulatory protein, Fis family
  misc_feature (1)..(44): Xaa is any amino acid
LEDKLLDEALANADGVKNQAAELLGIKRTTLIEKLKKRGIRTDG

SEQ ID NO: 107326 - protein, 215 aa, Unknown
  Obtained from environmental sample
  DOMAIN (1)...(190): Amidase
  misc_feature (1)..(215): Xaa is any amino acid
AFYESLGRLEDLGAEVIEVSCPHFPYALDAYYLIMPAEVSSNLARFDGVRYGLRVTPEGGGTAEQMMAATRGAGFGDEVKRRIILGTYALSAGYYDAYYGSAQKVRTLIQQDFNNAFEKADVLVSPTAPTVAFKLGEKLDDPLAMYLNDIATIPANLAGGPGISIPNGLVDGLPSGFQILAPARADDRMYFVAAALEMALEREWGGPILNLAPEL

SEQ ID NO: 107327 - protein, 46 aa, Unknown
  Obtained from environmental sample
  misc_feature (1)..(46): Xaa is any amino acid
MTSPKLVDYDTAVSEYDPVLGIEVHVELGTKPKMFCPAEVSFGAEP

SEQ ID NO: 107328 - protein, 268 aa, Unknown
  Obtained from environmental sample
  DOMAIN (91)...(255): Phage integrase family
  misc_feature (1)..(268): Xaa is any amino acid
ETIKSYEADLKSLCEQTELSKDSINLFLTEKAKASNYKPSSLARHFSSLRGFLSYLEEQNLLDFSPENLLAAPRLEKYLPQCLSIDEVAEIFENINSDDKFGMRDIALLELLYSTGLRISEAVSLKLEHIQLDNGWVTPVGKGNKQRLVPLYGKAKQNLEMWIKEWRQKLKPKTDTVLLNFHGRKLSRIGAWKIIQSRTAFLGKSSISPHSFRHSFATHCLAGGMDLRILQELLGHVNLSTTQIYTHLDNSYLKSEHHHFHPREKSPG

SEQ ID NO: 107329 - protein, 79 aa, Unknown
  Obtained from environmental sample
  misc_feature (1)..(79): Xaa is any amino acid
VRKTLTIVDMFCGAGGESTGILEAAQEQDMDISLYAINHWETAIETHSANHPSAEHLCQSVEHIDPAKVIPRQKLDLLW

SEQ ID NO: 107330 - protein, 68 aa, Unknown
  Obtained from environmental sample
  misc_feature (1)..(68): Xaa is any amino acid
MLNVTQTPQFLRDIKKSDKKHRDIATLKELIEKLVNREPIPEKHKDHPLKGNYSGYRELHITWKPDFL

SEQ ID NO: 107331 - protein, 184 aa, Unknown
  Obtained from environmental sample
  misc_feature (1)..(184): Xaa is any amino acid
FERSGFFKDYGKSDKDKIVSREVEVLVHEQKKEIQKREIREIPRSTPFKPNQAQNSLNKGIKGFSMDLSLAGAGESGVSIGSGGMENAIYDASEVEVEAKLLKEVLAEYPVQAKKRGISGYAKIYMVIDRNGNVSEAFATAVEPAGLGFEKEALAAVKQYKFSPALVGGVPVQQRFTKEFRFVP

SEQ ID NO: 107332 - protein, 71 aa, Unknown
  Obtained from environmental sample
  DOMAIN (1)...(66): Ribosomal Proteins L2, RNA binding domain
  misc_feature (1)..(71): Xaa is any amino acid
MRYIGGGHKKQYRIIDFKRDKDGIPATVKTIEYDPNRTARIALLVYADGEKRYIIAPNGVGSSRVDLQACK

SEQ ID NO: 107333 - protein, 96 aa, Unknown
  Obtained from environmental sample
  DOMAIN (1)...(96): Ribosomal protein L23
  misc_feature (1)..(96): Xaa is any amino acid
MNIILKPIVTEKMTHLNEKLNRVGFVVEKKANKVEIKKAVEDFYNVKVVDVNTISYAGKTKARYTKAGFIKGRTNAFKKAIVTLEKGENIDFYSNI

SEQ ID NO: 107334 - protein, 72 aa, Unknown
  Obtained from environmental sample
  misc_feature (1)..(72): Xaa is any amino acid
MVEIRTNLNILKKKSLLIVKNQNIFVSLSSRNLPQIKVVNVSDLNTYDIMNANNLLFMEEAIDALNEFYAEN

SEQ ID NO: 107335 - protein, 50 aa, Unknown
  Obtained from environmental sample
  misc_feature (1)..(50): Xaa is any amino acid
LPAKYKDHALSGNLQGKRELHIEPNWLVMYKSTDTEITLIRTGSHDDLYK

SEQ ID NO: 107336 - protein, 260 aa, Unknown
  Obtained from environmental sample
  DOMAIN (13)...(185): Radical SAM superfamily
  misc_feature (1)..(260): Xaa is any amino acid
AATRREEVFAGWVSISVGCNNTCTFCIVPQLRGKERDRRPQDVLAEVASLVADGAIEVTLLGQNVNTYGIEFGDRGAFAKLLRACGEIDGLERVRFTSPHPAAFTDDVIAAMAETSNVMPSLHMPLQSGSDPILKAMRRSYRAEKFLGILDRVREEIPDAAITSDIIVGFPGETEADFAATLAVVERARFASAFTFQYSPRPGTPAAELPDQVPADIVQDRFTRLLRLQERISEQEAARQLGHTVEVLIAESGGKKGEAT

SEQ ID NO: 107337 - protein, 241 aa, Unknown
  Obtained from environmental sample
  DOMAIN (1)...(200): Calcineurin-like phosphoesterase
  misc_feature (1)..(241): Xaa is any amino acid
ILTLIAGILLSALTTAAGWVETMQKIMAKGVSFIASGGDQVDKSAGEEVEYTNFFAPTGLRNIPFAPVSGNHDNHLHFNYHYNLPNAQTFADETVATEAGRNYFYLYNNILFVVLNTAPYPGSTSAAQPNVERFNKTLTAAKAAYAGKYDWLIVQHHKSTASVADHLADRDIQYYVEAGFEKVMSDHNVDFVLAGHDHVYARSYPLEGKDGGKVSVPDKSANLEEKRLILIPIPASLSILH

SEQ ID NO: 107338 - protein, 230 aa, Unknown
  Obtained from environmental sample
  DOMAIN (1)...(176): DNA topoisomerase
  misc_feature (1)..(230): Xaa is any amino acid
LTKDQLRLYTIIWERFVSSQMNNAKSRTVSVDIKVTEGQDEGLFRVSGTKLLEKGFYKAIKVLSSKEENSGSCPTLKTGDKVKAEKFKKEQHFTQGPARYSDASIVRILEEKGIGRPSTYASIISVLLDRYYVTRSNKQLVPTVLGKLINEVLVEHFPLYVDVDFTASMETKLDEVEENKISWPDMIREFWQPFKTTVDDVSKTIESFKGTLDEQTEFICEKCGKPLLKK

SEQ ID NO: 107339 - protein, 163 aa, Unknown
  Obtained from environmental sample
  DOMAIN (14)...(64): Clp amino terminal domain
  misc_feature (1)..(163): Xaa is any amino acid
MRISGHVQAIIDAAYNEAKLRNHEYLTPEHILYAALAFDEIQEVLFSCGANIEQLKLGMENYFEQKLAVTTTGEPVKTVGFHSIIERANLHCRSSQKEMIDVADILVSLYDEERCYSAYYLRKAGVKRLELLQTLSHNSGNEDFFSSGKDGQNGKFPRHPLDS

SEQ ID NO: 107340 - protein, 248 aa, Unknown
  Obtained from environmental sample
  misc_feature (1)..(248): Xaa is any amino acid
ADSAALYASHVNSDGSFFNPWLQRQRIEGRSSWFSGKKEKFEEIPEEQYGFVQNDYAYLSDNSFDSITFAGHASMIIKMNGQTIFTDPFFSNAALIVSKKVKIKFDFSKVPQKPVVLLSHNHYDHFDKYSIKQLAKKDAVFIVPLGLKELTEKYGAKEVYEIDWWQSIKLNSIEYTLLPAQHWSRRIGQSSGETLWGSFLIQGRKTIYFSGDSGYFIGFKEFSKRWNIDYAILGAGAYEPRWVMHYSH

SEQ ID NO: 107341 - protein, 142 aa, Unknown
  Obtained from environmental sample
  misc_feature (1)..(142): Xaa is any amino acid
MQGFATVFADVAEKVVPTVVSVIPTKIDTVVFTNNPFYQFFDSPFFGGGNPFEEFFGGQQQRRGRPQEPQQQRQERRSQGLGSGVIVSRDGYILTNYHVVAGADEIEIKTADGRGFDAYVVGADSLSDVAVVKIKESVNNLP

SEQ ID NO: 107342 - protein, 217 aa, Unknown
  Obtained from environmental sample
  DOMAIN (28)...(87): TGS domain
  misc_feature (1)..(217): Xaa is any amino acid
NWRHNETRQSTASTWLKEIKQEIFKNTIYVFTPQGKVIALPKGSTPIDFAYCVHSAIGDHCIGAKANGAIIPLSRELQNTEVIEILTNANAHPHVNWLSIAKTTKARNKIRSWLNKNDDSIATEKNIAAKKKQTITEILPVPNTEIPPLQQVINAVPSDVLSVKIEQEKNILLHFARCCNPIVGDFITGYVSRGRGIIIHKKDCPNLANIPDLKAGK

SEQ ID NO: 107343 - protein, 108 aa, Unknown
  Obtained from environmental sample
  misc_feature (1)..(108): Xaa is any amino acid
LFLFGAIAELISEILKNAQFENDENWDMSSSSELFEIQNLLERGICDEPSILLNEGNLIKNGYSEELDGLKLLKDKGSQFLEEYLEEEREITGITSLKIKYNRLIGYF

SEQ ID NO: 107344 - protein, 91 aa, Unknown
  Obtained from environmental sample
  misc_feature (1)..(91): Xaa is any amino acid
MKHAVLWEEGFQKRRLLHPLRELKRINARLDIVENLYRDQGRLSKLRELLGKMPDLERLCSRLAMDKAHGRDILAIKNSLVSFRGYRRINK

SEQ ID NO: 107345 - protein, 218 aa, Unknown
  Obtained from environmental sample
  DOMAIN (1)...(146): NAD dependent epimerase/dehydratase family
  misc_feature (1)..(218): Xaa is any amino acid
LQVDSRGSHSSAAVYGEPEYLPIDEKHPTKPENFYGFTKLEIERFLGWYEKLRGIRYASLRYFNAAGYDVKNTIKGLEQNPSNLLPVIMETACGMRAELQIFGSDYDTPDGTCIRDYIHVSDLAVGHAAALDYIIKNNKSLIVNLGSEAGSSVKEVLETARRVTGKPIPAKIVGRRSGDPAKLTASSALAHELLGWEAKYSDMETLIRTSWEVYKNQE

SEQ ID NO: 107346 - protein, 176 aa, Unknown
  Obtained from environmental sample
  DOMAIN (16)...(176): Histidinol dehydrogenase
  misc_feature (1)..(176): Xaa is any amino acid
MRRIDLRGQRLTRRELQEAVPRADLGVSDAMAVVEPIVDDVRQRGAVALRDIAEKFDGVRPTDLKVPKEALTKAFKNLDPQVRAGLEESIKRVRQVHLDQVPKPHVTQLAPGAIVRQKYIPVERVGLYAPGGLAVYPSSVIMNVVTAQAAGVESIALTSPPQKEHGGLPHPTIWLR

SEQ ID NO: 107347 - protein, 180 aa, Unknown
  Obtained from environmental sample
  misc_feature (1)..(180): Xaa is any amino acid
ACLQVDSRGSHIRAEVPNDLPAEVSAIGAQAFTAEADLVFQPVVVTPAPIWCSFTGLTHLPETHELCTNPRNNNEDQNRALGQYLTAQRGWVGDQWQCMDNLMMRESRWRHNAANPVTAARGIPQKMMSVHYGANWRNSATAAAWMADPEAQIEWGLNYIERRYSNPCGAWTFFLRNGWY

SEQ ID NO: 107348 - protein, 228 aa, Unknown
  Obtained from environmental sample
  DOMAIN (1)...(228): Aminotransferase class I and II
  misc_feature (1)..(228): Xaa is any amino acid
GLRLYPDPECIEFREAVAARYGVKTEQVFAGNGSDEILAFAFGAFFESDKDGVIGKSGEKMPPILFPDITYSFYPVYANLWDIPYRLMPLRDDFTINIDEYKVQSGGVILPNPNAPTGIALPLEDILSLAKYLAGMGKVFIADEAYIAFSGAKSAKLGSLSAVPHINANPNLLTVHTLSKSASLAGLRAGFAIGNEKLIEALCRIRDSFNSYTMDRIALAGASAAVSD

SEQ ID NO: 107349 - protein, 213 aa, Unknown
  Obtained from environmental sample
  misc_feature (1)..(213): Xaa is any amino acid
APNRSGASTGASDSGTGVSFVTNQIVVIAKNSATDAQVAAAAAAINGTVVAQVNSIGMYWIRVPAQNEAPLRALCAKVLSDNPTVLSAASLDTLRPVDVPKPSAAPKLPSVRGAGQTNDPWWDNGQWGLTAMNVPQVWETYKGRLSDTKVGVVDNGFRASHEDLQLPSGNIYNRNIANKDHGSHVMGTIGAVHANQKGLAGVKKQRGRACGIL

SEQ ID NO: 107350 - protein, 227 aa, Unknown
  Obtained from environmental sample
  misc_feature (1)..(227): Xaa is any amino acid
MTTTDLNEKINLTGDASVSFIKKLLKNPIMFSVALLLILMIQNIITTPDFFNISITNGLISGYIPNILDQASTLVIVTLGMTLVTAVSGGQDISVGAIMAIAASCCGLMLNGPEYRTEVFHHPYNYALMAGLLGGALCGAFNGFMVAYLRIQPMIASLILYTSGRSIAKVITHGQTVYIMNPVFKYLGVQIPGVPIRTTIIVTAVMILLVVLIVRGTSLGLFIKSVG

SEQ ID NO: 107351 - protein, 96 aa, Unknown
  Obtained from environmental sample
  misc_feature (1)..(96): Xaa is any amino acid
MKDIVLCETLGRCEGHEPRTGVQCMGLLNSASGKLEALPEAFLAGLQPRYDIVLLEADGSRGLPCKGWLENEPVVPHYCTHTVGVITMSALGNKPG

SEQ ID NO: 107352 - protein, 211 aa, Unknown
  Obtained from environmental sample
  misc_feature (1)..(211): Xaa is any amino acid
ESLFEYHLYTFDRPTTLKENQTKQVALLSASNVPATKEYELGDRGTYHYRNNDPSGEKVKVKVFVTFQNKESASLGKPLPKGVIRVYKNDSAGRAQFIGEDRIDHTPKNEEIRLKLGEAFDVTAMWKQTDFKKISGWGKYSYVYESEFEIEIKNAKSENVSVSVFEDIPGDWEILETSPAFTKGSAWSAKFVVDVPADGSATLKYRAKVMM

SEQ ID NO: 107353 - protein, 247 aa, Unknown
  Obtained from environmental sample
  DOMAIN (1)...(128): FtsK/SpoIIIE family
  misc_feature (1)..(247): Xaa is any amino acid
VWALAYQLSPAELALALVDFKGGATFGDLLTLPHVVGQVSDLDTGLADRALAGLRAELIRRKRVVAAHGVSDVGELPTGVLPRLVVVFDEFRALTEELPDAIPQLFRIAGQGRSLGVHLVLATQRAAGAVSPEVRANVSARLALRVVTATDSLDLVDTPLAANLPAVPGRAIYRSGAGEPQALQCAWADAAAPPTVFRPDVPLAAQTTAAPSLLSQITSRSDPVSSQPPIWLPPLPAAITLDEVIGS

SEQ ID NO: 107354 - protein, 134 aa, Unknown
  Obtained from environmental sample
  DOMAIN (22)...(95): Sigma-70 region 2
  misc_feature (1)..(134): Xaa is any amino acid
MEIEALWTEYKTNGSTTARDKLLAEYTPLVRYTAQRMAINLPKSVQLGDLIGTGVMGLIKAVESFDTTRDVKFETYATHKIKGAILDDLREQDWIPRSIRQKSKMVKNAYIELEKEIGRTPYDNEVADHLNLNP

SEQ ID NO: 107355 - protein, 230 aa, Unknown
  Obtained from environmental sample
  misc_feature (1)..(230): Xaa is any amino acid
EHPAIITQNKVYKEFGGWQTLIILSKSPDSAAYANFIASLAASLEQSDLVNLAEYRTEADFYREHKLLYINLNDLETIKDRIKSLVAKQKEKLNPFIVELVKDTSASGKPFFYLEDIEWKYLQKLKNFRGSTDGKVQVLEIYPAKNNSNLPDMRKLYGLAKAKADSLSEQKNIDVLYGGAAYDFVANSRTLLSEVRTLGLISAAVLFAIFVFFLFQKTDYISNYGFVPCY

SEQ ID NO: 107356 - protein, 73 aa, Unknown
  Obtained from environmental sample
  misc_feature (1)..(73): Xaa is any amino acid
NFDIIFDILRENMLNRKDKKLIHCSHNNIVYSGDPSYIKTVKWSNFLVSPQEYINIAIKNKNHIDEYVIKKEV

SEQ ID NO: 107357 - protein, 257 aa, Unknown
  Obtained from environmental sample
  misc_feature (1)..(257): Xaa is any amino acid
MGNMPGFEASGDVFLAGCQSINMSTGLVTLVKISNGRVSLPMWKAESKTSVSRYSGNDTITQNGNTNEYVSLGISDNPTITWENEADLIAAVEFNSITFNKGSATISANEGTLISKGGGDMKWTAVVDSTFGYSEINAITYGGGKFVAGGRGGKMAYSSNGVTWTAVTNSTFGNSDITAIAYGNNKFVAGGSGGKMAYSTDGVTWTAVTDSILGKNSPGAIAYGNGKFIAGSGNKMATSMDGITWTDVANSPYSGSS

SEQ ID NO: 107358 - protein, 203 aa, Unknown
  Obtained from environmental sample
  misc_feature (1)..(203): Xaa is any amino acid
EAQAETDTVAGMITDARDGQKYKTVRMPDDNTWMAQNLNYKTDSSWCYADSCKKYGRLYTWDAAKNACPAGYHLPSDAEWDSLLEAVGGYDAAGKKLKSKSGWNSYDGKIANGTDDYGFSALPGGYRFPPVDSNDTAGYFGFWWAAGGNRYVYYMNHYNDAVYVSFHDKGIAHSVRCVKDSIIHEYGTLADARDEQTYRTSGI

SEQ ID NO: 107359 - protein, 118 aa, Unknown
  Obtained from environmental sample
  misc_feature (1)..(118): Xaa is any amino acid
MKNKFNVILAAVFAIILPLSFLSCEKESWKPGMPLPKENVKIGVVHITDPFTESSGYSFAHQKGIEEMKEHLSLADSQVIYKIHIDDADLISVENAHRELIAQGANIIFSTSWGHTNA

SEQ ID NO: 107360 - protein, 180 aa, Unknown
  Obtained from environmental sample
  misc_feature (1)..(180): Xaa is any amino acid
VWGKVYTIASSQREMQENVVPSKLQAQNLSLLQVVNTVVTNNLSFPAGSIKTDSLTSAIRLSAKYSSIEDIGNTVIKRNSDGSLLKVSDVAEVVDAVKEVSGFYRLDGQPAVGMYISKQEDANTVEVAKLAKEKVKILEERYKEQGLKFGLAMDGSTIIRNAADAVRFDINLAVVFVTIL

SEQ ID NO: 107361 - protein, 194 aa, Unknown
  Obtained from environmental sample
  DOMAIN (137)...(174): RHS Repeat
  misc_feature (1)..(194): Xaa is any amino acid
ITKYAYRDDSALIRKEQGPLYFEYKYEAGGRIASVTRGETGTDKKYTENYSYKWQGWNEERTVTSGAETTVYQFDHLGQITAITNAQGEKSSRTLNSAGNVLREQRADGDLYEYKYDALGRPYRVDYNGAMLIQVQYNLNGDIIEKTDRLGNKTQYAYDGRGLLVRETIASQEERYYYDDASRLIRHESVNRNS

SEQ ID NO: 107362 - protein, 47 aa, Unknown
  Obtained from environmental sample
  misc_feature (1)..(47): Xaa is any amino acid
MNSFSLPALDVAGLYRARWRVEMFFKWIKQRLRIKAFYGTSENAVKR

SEQ ID NO: 107363 - protein, 91 aa, Unknown
  Obtained from environmental sample
  misc_feature (1)..(91): Xaa is any amino acid
LTAGLGGMGGAQPLAATFAGAVSLNIECQQTSIDFRLRTRYVDVQAKDLDHAIELIKSHAASKEAVSIALLGNAAEVLPELVAKVKSGAIS

SEQ ID NO: 107364 - protein, 138 aa, Unknown
  Obtained from environmental sample
  DOMAIN (12)...(111): Transposase IS200 like
  misc_feature (1)..(138): Xaa is any amino acid
MSAYRQILYHIVFRTKNSEKTINHAHSADLYQYIWGIVKNKNCTLFRINGMEEHIHMLSDLHPSVALADYIRDIKVSSSKWMKESGFFPNFKGWGVKYCALTYSYNDRDILINYIKNKQGHHKKENFQEEEKRLFKEQ

SEQ ID NO: 107365 - protein, 207 aa, Unknown
  Obtained from environmental sample
  DOMAIN (16)...(207): Aminomethyltransferase folate-binding domain
  misc_feature (1)..(207): Xaa is any amino acid
AGILTEHQHTRSQASVLDICHMGEFLHSGPGARRALSLSVTHNLDALSSGRCRYGFILTDDGGMADECIVYCFSDASYMIVVNGACTDKDKRILASRLKESVAFDDASSRTGKIDLQGPLSAGVMEAALGLNIRDIAYFAFRRMPWRGVDLLVSRTGYTGELGYEMYLPWDKTALLWEALVADERVKPAGLGARDTLIMEAGLPLYG

SEQ ID NO: 107366 - protein, 91 aa, Unknown
  Obtained from environmental sample
  misc_feature (1)..(91): Xaa is any amino acid
MLNHISGQRDQIIEWQRAMTALPALSPENGGQGEAAKAICLEGVLRGMGLSVDTIRAPDSRVESGMRPNVIARVPGRDPRVKGFSATCGIL

SEQ ID NO: 107367 - protein, 233 aa, Unknown
  Obtained from environmental sample
  DOMAIN (73)...(150): Bacterial Ig-like domain (group 2)
  misc_feature (1)..(233): Xaa is any amino acid
LWAVRKPLTAAIIPSNATNKNVTWSTSNANVATVSTGGVVSGVSEGTAIITVTTVDGGIKASCAVTVSTTAVAVTGVSLKEFTSLVVGGTETLTAIVIPSEATNQNVTWNSSDTAVATVSAGGVVTGVSVGTAIITVTTVDGGKTASCTVTVTGSGNSDNTGEAQETQGLWFTLMDDNTYKVSGGSVGEVIIPAMYNGLPVTTIDDWGFSGHDGLTSITIPDSVTSIGRYEIQ

SEQ ID NO: 107368 - protein, 118 aa, Unknown
  Obtained from environmental sample
  misc_feature (1)..(118): Xaa is any amino acid
WAFDSEDAYPEVALADLGAILLPVKPGLQVRMEIDRATRKITGITVIIGQAAVQVQAFAAPRSEGIWDEVRAEISAGLNAAGGGQIDDVPGRFGRELVARIPGKTPDGADSVFSARFI

SEQ ID NO: 107369 - protein, 161 aa, Unknown
  Obtained from environmental sample
  DOMAIN (128)...(161): Threonyl and Alanyl tRNA synthetase second additional domain
  misc_feature (1)..(161): Xaa is any amino acid
LDVRERDGEILHMISAKDSGKLEVGKAELVLDIRRRRDHTQLHTGQHLLSGTLLRMTGAPTVSMHMGEEVCTIDVNIPEIKDEALIAVEDAVADAIEENRPVKIHLCPPEDISSFKLRKVPPVGEEVIRVVEIEGHDIIACSGTHLKSTAEIGLLRIMGAE

SEQ ID NO: 107370 - protein, 158 aa, Unknown
  Obtained from environmental sample
  DOMAIN (19)...(83): ATP synthase alpha/beta family, beta-barrel domain
  misc_feature (1)..(158): Xaa is any amino acid
MSRLEEIARIRLADVRGRIVKIIGLVIECEGPNAGIGELCVIEQNGKIICSAEVVGFRETRTLIMPLGPLEGIRPGMSVVAKGDTLTAPVGKELLGRVIDGMGNPMDGLGEVRYKERRSIYATPPSAMERTRIKEPMFTGIQRIDGLWDPLESTCRHA

SEQ ID NO: 107371 - protein, 90 aa, Unknown
  Obtained from environmental sample
  misc_feature (1)..(90): Xaa is any amino acid
LNIDIVRSKAKKSLAEFNAERALKSSRLNNFLQKNVDSVNRHLSEWEKIKKWKAVFATLTTENGLLTPTMKLRRSEVEKTFESEINGMYE

SEQ ID NO: 107372 - protein, 74 aa, Unknown
  Obtained from environmental sample
  DOMAIN (1)...(51): RNA recognition motif. (a.k.a. RRM, RBD, or RNP domain)
  misc_feature (1)..(74): Xaa is any amino acid
EFGEVKSAFFVFDRDSNRSKGFGFVEMDDEAAEKAIQSLNGKNVGNRALRVNESQPREQRPPRQGGGGYGNRRG

SEQ ID NO: 107373 - protein, 86 aa, Unknown
  Obtained from environmental sample
  misc_feature (1)..(86): Xaa is any amino acid
LGSLERLSTDKVRTRIIHSAAGTVNKNDILLAEASDATIIAFNVAAEREAEELAREGGVDIRSHTIIYKVTEEITNAMVGLLDATY

SEQ ID NO: 107374 - protein, 152 aa, Unknown
  Obtained from environmental sample
  misc_feature (1)..(152): Xaa is any amino acid
DIDYQNGQKTGLYLDQRENYQRVARYAQGRRVLDAFCNQGGFTLFAARAGADMARAIDSSEKKKHILRKNAAANGFQQIETVEANVLEYFHQNRNERWDLVILDPPPFAPVKKRLDSAYRGYKELNLRAAQSLDRGGILASLSCSHHIGLAD

SEQ ID NO: 107375 - protein, 265 aa, Unknown
  Obtained from environmental sample
  misc_feature (1)..(265): Xaa is any amino acid
LEQNSPIGKNSIWVLIEGEDDIKLYPKLFKTDRCKIKFVHGGCGQLEKAIAGLQKYADLVLGIQDADFLHLTKKYSAYQNLLYTDYHDIEMTMINNDAVFNNILYEYSLQEKNREIKQNILTEASFVGYIRYYNDVNNYSINFKGLTYGDIVTREKENSLSLQKSALINKLNEHSLEKKVTIEENVVNQFISSNSSVDLYQLVSGHDFIELLQHRINFIITNKIKDKVISMSLRISYQIEHFKQTQYIKIFYYVGSSRVDLQACK

SEQ ID NO: 107376 - protein, 90 aa, Unknown
  Obtained from environmental sample
  misc_feature (1)..(90): Xaa is any amino acid
DVIEEKKKNEVLSEPGDVVAVRKAIQDAGMDYESAEVVFEPSMEVDDLDVDASRKIVRLLEALEDLDDVQEVFSNFAPSKEVMAALEAED

SEQ ID NO: 107377 - protein, 237 aa, Unknown
  Obtained from environmental sample
  misc_feature (1)..(237): Xaa is any amino acid
KNSLGSAYWTGEIKIPVKGEGLKDPVTLVVSYMTCLEGEGGLCFPPADKELKVRAADIPSDAAAGAEAKAPPAAEPQAPQQVPAAGTATAENNPFAANASAPLFADETAAAGLSAEAPAPKPSKRGLLVVLILFFLGGIGASLTPCVLPMIPITMAVIGAKGVGKSRGMLLGVALTEGMALTYTILGVAAALTGGVFGQFAQRPAFLIPVGIIFALFAQSLFGAFVGSSRVDLQACK

SEQ ID NO: 107378 - protein, 99 aa, Unknown
  Obtained from environmental sample
  misc_feature (1)..(99): Xaa is any amino acid
TTGVRLERGVYLGGLGPELETPAQTRMYRQAGADAVGMSTVQEVIAARHLGMRVLAFSCLSNTNLPDCMGETGIEEIIATVRASSGKLHRLLGALLPHI

SEQ ID NO: 107379 - protein, 226 aa, Unknown
  Obtained from environmental sample
  DOMAIN (11)...(175): Glycosyl transferase family 2
  misc_feature (1)..(226): Xaa is any amino acid
MASFSNRLSFSIIVPVYNDEKYLSHCIDSILSQTSNNFECLLIDDGSTDKSSILCDTYCKLDQRIRVFHKNNEGISKTRQFGLMNALGEYLLFVDSDDYIESELITDLMNKVNDEDADIYFFDFYEENTAGGKKIIRQNYSPFDYESALRLVLERKLFSCVWNVIIKKDFCIRNKIYFQENINYGEDSLFIIELLLNKPKTSYFSCVYYHDIINQWDPLESTCRHA

SEQ ID NO: 107380 - protein, 236 aa, Unknown
  Obtained from environmental sample
  misc_feature (1)..(236): Xaa is any amino acid
LACLQVDSRGSHRPLAPYGQTEGTERKNRLFGKDLEAQGGEFVPLFNEFDAGYDFLGNDGKTFYIRTDNGAPRGRVIAVDLDRPAPTAWREIVPQAGGRDVMAGASLFGDQIAVTWKIDALNQVKLYDIFYGRPIKQIRIGGVGTMTGFGGRRHDDEAFFAFTSFNEPPTIYRYDFKKGKDSVFRKPKLDMNPSDFEVKQDFYASKDGTRVPIFLAYRKGTKLDGSNPTLLYGYGG

SEQ ID NO: 107381 - protein, 257 aa, Unknown
  Obtained from environmental sample
  DOMAIN (6)...(133): Glutamine amidotransferases class-II
  misc_feature (1)..(257): Xaa is any amino acid
MLLLDITAIPHRRQHKRKRGEPFVTEYLTGRLATAHNGNITNAKEIRKKLKSFGVRFDATSDSEVVSSLIAYCITKTQSAILGVVKATDLLEGAFSLVIASGKHKLIAVRDPNGFRPLCIGENEFGCAVASESCALDTCGFKFVRDVQPGEVVVIENGKIAYQGKLAEKNKMGGLCIFEYVYFARPDSIIDSLSVYEARYNMGYRLAEEYPVDADVVCGVPDSGLDAASGYSAKSGIPLAAGFVKSRYVGRSFILSN

SEQ ID NO: 107382 - protein, 44 aa, Unknown
  Obtained from environmental sample
  misc_feature (1)..(44): Xaa is any amino acid
THYIQTILGPLWYIISPLISTVMYTFVFGRLADIETDGIPYTLF

SEQ ID NO: 107383 - protein, 170 aa, Unknown
  Obtained from environmental sample
  DOMAIN (2)...(114): Resolvase, N terminal domain
  misc_feature (1)..(170): Xaa is any amino acid
MGLDKWIEETISGTKLPEERLLGPLLAEAKTGDIIVCSELSRLGRSMFMIMSILDNLLINGAQIWTIKDNYQLGDDIQAKVFAFAFGLSAEIERNLISQRTREALARKRSEGIKLGRPLGRKSSRLKLSGHEAEIRSMIGKNISKSAIARRFGVCRQTVSSFLKRTAQTA

SEQ ID NO: 107384 - protein, 258 aa, Unknown
  Obtained from environmental sample
  DOMAIN (39)...(258): SecA Wing and Scaffold domain
  misc_feature (1)..(258): Xaa is any amino acid
DPGESRFYLSMQDELMRRFGNMAMAESMMNRSGMPDDMPLESKMVSKGIQSAQGSVEAVNAEIRKNVLKYDDVMNRQREVIYADRRRVLEGADLEDQVMHFKDDVIKAYVDGATSESNNPADWDLEGLWTALKAIYPVSEGLTPAQIEAEVGGRAKLKPSVLEATLVADSDRAYDAREEKLTEPVMRELERRVVLSVLDRKWREHLYEMDYLKEGIGLRAMAQRDPLVEYQIEGHQLFTSMMEAIKEESVQYLFNLEV

SEQ ID NO: 107385 - protein, 261 aa, Unknown
  Obtained from environmental sample
  DOMAIN (113)...(202): His Kinase A (phosphoacceptor) domain
  misc_feature (1)..(261): Xaa is any amino acid
VLVCDTSNKLILANKAARRFLSIVSYEQGRETIWSVIPEESVAEFLAQTLLSTDAAEEREFYVDVNGVQRLLAVSVMPVVQDRQITGSVILIEDITERRNREARLRRMESLASLTTLAAGVAHEIKNPLGALSIHVQLLQKAKDAQEKLCSAIQSATSPKTECEPNKYFRQIDKYIKVLNEEIERLNRIIVDFLFAVRPMKLEPRRGSINEFIKELEDFVSFELKEAHIKCVLNLDENLSDVDFDAALMRQAFLNLISGIL

SEQ ID NO: 107386 - protein, 256 aa, Unknown
  Obtained from environmental sample
  misc_feature (1)..(256): Xaa is any amino acid
MKILLLTHDILHLKSEAERYYAKFAGLCPETEFFFFHSPAATSASISANANGLCLPKKAQVILRVEEAMQNGSIANDGCLLPCLQHCVEELAQVIAGMEFDLIEVPDSVPVGDLLRPALGRHKVRYKKIVAGLHGRLSSSLENGWNPQAAKNIRWLEDTQCKAADAAYTFSEGRRLEWRAIGQTPCFLVSPLHFIEPARPLPSVPETQESLPALYFIGNSRKMEGSDLFFDVGALAASGPVRRVRLLGHDLDNEAA

SEQ ID NO: 107387 - protein, 87 aa, Unknown
  Obtained from environmental sample
  misc_feature (1)..(87): Xaa is any amino acid
MDNSNDSGNANIGRRDFIKLVGAGAALAALSGCGSKDASSAKGSEPKGEMTYRFDPKNGNRVSLLGYGCMRYPRLPKSQDLVTENNL

SEQ ID NO: 107388 - protein, 188 aa, Unknown
  Obtained from environmental sample
  DOMAIN (89)...(188): Histidine kinase-, DNA gyrase B-, and HSP90-like ATPase
  misc_feature (1)..(188): Xaa is any amino acid
VTAVDSNASQKTSDSLSNIRINAERLMQIVNDIMDISKIESGEMSLKKNPCDMHELLAGCRTLVMPKAVEKGLLLHFYAEPSVGKRPVGDISRLRQIFVNLLFNAVKYTNSGMVKLVSDILSIDDKSITIHFEVKDSGVGMTQEQIANIFRPFSQVAKSYKNGATGLSLPITKSIIEKMGGALSVTVR

SEQ ID NO: 107389 - protein, 202 aa, Unknown
  Obtained from environmental sample
  misc_feature (1)..(202): Xaa is any amino acid
MRDRKAITKTALPRIYFIDREIAAGKYPNTRTLAKAYETGTATISRDIEFMRDMMNAPIEYDYTRKGYYYSEKTFRLPAAFASAEDMLALGMTKTLLSLYKDTPVYDVTRQLMESITAPLADTENPHWYEERILVPPVPSVLFPPEIWRTITEGLRQNRLLKFEYRSTWTSGYQTRRIRPYHLLFDPRRVVSLRLLGRTPGH

SEQ ID NO: 107390 - protein, 215 aa, Unknown
  Obtained from environmental sample
  misc_feature (1)..(215): Xaa is any amino acid
MIASFGDEAFILFAVAPETAVILSVIIFIIAVVSGIIVNVFVKKFPTPFNPDHFAIHKSDHEHSHSDVTGGWRYNLTHLSFQRAILIAGIVLVISAIALGWFEHSHSTPDIHEHDCAATHIHAGHEHHEYHNNDIFGILFQERWLNILFIVVGIVVLFIITVVQEHFLQEHLWEHIIKKHLPRIFLWTLGALTILQIGKHFFDMDEWIRGNHLYI

SEQ ID NO: 107391 - protein, 201 aa, Unknown
  Obtained from environmental sample
  DOMAIN (2)...(104): ABC transporter
  misc_feature (1)..(201): Xaa is any amino acid
SRRSGGSFFESRRTFYWIELSRRYPHELSGGQIQRVSVARALICKPSLILADEPVSMVDASLRMAIVNLFKILRDKEKVSVIYITHDLATAYYISDRIAIMLRGYVVEMGPVEAVLGNPLHPYTKLLKESVPAPAPKDKEGWAKRIGLSTTEVREYSRQGCKFHGRCPDALEQCKHDDPPDTEAEGRIVKCHLYAKKKGNP

SEQ ID NO: 107392 - protein, 221 aa, Unknown
  Obtained from environmental sample
  misc_feature (1)..(221): Xaa is any amino acid
GIWAYNIPEWVPLFYAIARAGLVTVPVNVNCKHKELAYILGQADIKGLFFIEKFRGTDLAQILYEVIPELQSSKPGELQSAQFPFLKTMANMGNSEYEGMYTLKDIVKMGTTLDDNALKNAEAAVTNTDTVAIMYTSGTTGFPKGAMLSHRNVINSGYNANRLDVMTDSSAVLNPLPFFYITSFTGSLIESLVYGFKIVALESFDPLRSLAVIQSASFVQW

SEQ ID NO: 107393 - protein, 61 aa, Unknown
  Obtained from environmental sample
  misc_feature (1)..(61): Xaa is any amino acid
MDKTWIFPLEAEESISVAGSIGETLVEIRNGSAMIVSSPCKRQTCVAAGEINKNGQWGGIL

SEQ ID NO: 107394 - protein, 137 aa, Unknown
  Obtained from environmental sample
  misc_feature (1)..(137): Xaa is any amino acid
MKKTVICFSVLYSVLIVIPLAHAHEVHEHGAAKINIAVDGARVSIGLESPLESVLPFEHTPATPEQRKQVKDMARRMHQAEALFQLTPAAECRLENVRLASEKLDAALLDPNSPLDPAQADSGKGQHGKGKRAAKEE

SEQ ID NO: 107395 - protein, 247 aa, Unknown
  Obtained from environmental sample
  misc_feature (1)..(247): Xaa is any amino acid
TSHLLAKTILTSVILLALFFALDTVLFGKEGRPLHQAGTSENEEKLGIEGGINFLFLLCVVANTLISGQWKGPEFHVFGLPMEMQDVLRDVLYLAIAAASWLVTDRECRKRNEFTWDPILEVAKLFIGIFLSMIPAISILRAGAEGSLASVINMVTDAGGEPINAMYFWMTGALSSFLDNAPTYLVFFNTAGGDAAALMAHGETLAAISAGAVFMGAITYIGNAPNFMVRSIAIEQGVSMPSSSVIC

SEQ ID NO: 107396 - protein, 265 aa, Unknown
  Obtained from environmental sample
  DOMAIN (110)...(265): Phage integrase family
  misc_feature (1)..(265): Xaa is any amino acid
MDRGIFVSRAEVEKTTLREALDRYIAEYIPRLSQVYKETMRAKALQRRAIADRFLAAIRIKDIADYIKEREAEGMSGNTIRLDINMISRLYNVAASSWGMESLVNPVSRAQKPKVNKGRERRLEAGEEERLLKAALPPFRPVMLFALETAMRREEIATLDWSRIDLEKRSAYLPKTKNGEARSVPLSPAALDILKAMPGKHEGLVFGVRDYTITKYMVKACKAAGIVGLTYHDLRHEATSRLFERTNLDVMEIRKITGHKSLQML

SEQ ID NO: 107397 - protein, 123 aa, Unknown
  Obtained from environmental sample
  misc_feature (1)..(123): Xaa is any amino acid
MRNTIKFRFAGIGIMLAAIAVFSVVVMLLWNALMPQIFALPVLNYWQAVGLLILARVLIGSMGHGIGYRGAFGSGEDRLFHHGNRFREKWMNMSANERKEFIEKERDFFRTYRGFSRFHDFFN

SEQ ID NO: 107398 - protein, 93 aa, Unknown
  Obtained from environmental sample
  misc_feature (1)..(93): Xaa is any amino acid
SFIIPYCAHAEQQAIVSAIESRLSVCDKLEQTIDQTLALSASLRQSILKKAFEGRLVPQDPNDEPAEKLLERIRLEKAAVSAKQKQTRKRGKK

SEQ ID NO: 107399 - protein, 158 aa, Unknown
  Obtained from environmental sample
  misc_feature (1)..(158): Xaa is any amino acid
MYSASFLTLFYKEVLRFWKVAAQTITAPVLTALLYLLIFGHALEDRLQIYSGISYTAFLVPGLIMMSILQNAFANSSSSMIQSKINGSLVFILLSPVSHYEMFFAYVLASVVRGIIVGSGVFLITLLFIPPALSSVLWILVFAIRGPAILGNMGLIQK

SEQ ID NO: 107400 - protein, 68 aa, Unknown
  Obtained from environmental sample
  misc_feature (1)..(68): Xaa is any amino acid
MPEQFMESVIHHDRSLPVQSWILRIKQYADVENILAILRQNHIIISDMQLKPSDLEDVFIQIMDEQES

SEQ ID NO: 107401 - protein, 175 aa, Unknown
  Obtained from environmental sample
  DOMAIN (66)...(175): Putative sugar-binding domain
  misc_feature (1)..(175): Xaa is any amino acid
MTINDSAISEQGMCEEEQVARIAWFYYHDGLTQSEISDRLGLTRLKVSRLLEKGHQSGIIRVQINSRFEGCLEYETQLRRQFSLQHVRVIPGLADADVGGRLGIGAAHMLMSLLQPQQMLAIGFGEATMNTLQRLSGFISSQQIRLVTLSGGVGSYMTGIGQLNAACSRILFRLL

SEQ ID NO: 107402 - protein, 74 aa, Unknown
  Obtained from environmental sample
  misc_feature (1)..(74): Xaa is any amino acid
AVIASNKTSLPEVVGDAAIMIDYNNEEQFIKAFEDLYFNEDLRKYYIKKGIERAKLFSWEKTVNKMSECILNSL

SEQ ID NO: 107403 - protein, 223 aa, Unknown
  Obtained from environmental sample
  DOMAIN (73)...(223): UvrC Helix-hairpin-helix N-terminal
  misc_feature (1)..(223): Xaa is any amino acid
IYLQNNEDTLLLSERNSELIKSWFNRQFGYEPQLLLPTEKHHSVILAMARQNAVEDLRKRLKERGAGPALDELLRVLNLQTKPERIEGFDISHLDGKHPVASLICFKNGVPDRKNYRYFKLRTVIGKKNDFAAMREAVQRRYSRLLREEKELPNLILVDGGIGQVNAAKTVLDDLGINCDIAGLAKREEELWMPGAKEPVVLSRQSEALKVLQFVRDECPRFA

SEQ ID NO: 107404 - protein, 168 aa, Unknown
  Obtained from environmental sample
  DOMAIN (59)...(168): Cytidylate kinase
  misc_feature (1)..(168): Xaa is any amino acid
MASSFFIVTLDGPAGAGKSTIARKLAAALDIPCLDSGAMFRRLALELHGNVDIGEQELRAKCAGLHFLLRAVNGESRLLCNGVPVGDEVRTEEVSLWASRIAGNPIVRAVLKEAQRAVAAHSSLVAEGRDMGTAVFPDARWKFFLDAGPEDACPAPVGSSRVDLQACK

SEQ ID NO: 107405 - protein, 187 aa, Unknown
  Obtained from environmental sample
  misc_feature (1)..(187): Xaa is any amino acid
KQRNFFFTNNEKGQLVFFNPKAEKASVTFVEGKLPLISIKPKFSAQSFYSHITGFGKTDAEYPSLAWTFENKYLINKGILRHFSLTIEDSETISDLENAVKAHAGRMFADCVNFELVCENHVNEKNEVFQKGMSVCVSAPSAMITKETTFIARNIELARTIEGKTSTLTLVLPGSYTGEIPEALPWE

SEQ ID NO: 107406 - protein, 149 aa, Unknown
  Obtained from environmental sample
  DOMAIN (14)...(143): DHH family
  misc_feature (1)..(149): Xaa is any amino acid
MDGMGKAVARIKEAIAKKEKMTIYGDYDVDGVTATALLIRVLERMGADVAYFIPNRFNDGYGLHLECIRELAQTRKPKLLISVDCGVKSAKEVAASAEMGMEWIITDHHSPGEAPPGAVATIHPHFGSQQNRHLAGVVGSSRVDLQACK

SEQ ID NO: 107407 - protein, 173 aa, Unknown
  Obtained from environmental sample
  misc_feature (1)..(173): Xaa is any amino acid
EDISVAVLQYDGGLCSKGALAQVTSSVIHHGEEQQLIFQGEKARVSAPWRVSANIAQPNGFPAFGQQNEELKSKLNSFYESLPKLAHTLHPGQIDDVLTAIETGGKPMIDGEDGRRTLELISAIYRAGTEQRAVELPMRKDDPFYTVKGIMERVPHFYEKTASVNDQGGSITF

SEQ ID NO: 107408 - protein, 167 aa, Unknown
  Obtained from environmental sample
  misc_feature (1)..(167): Xaa is any amino acid
MKLSLSPPPYADAPVVVLISGLGGSGSYWLPQLAVLEQEYQVVCYDQRGTGNNPDTLAEDYSIAQMAAELHQALVAAGIEHYAVVGHALGALVGMQLALDYPASVTVLISVNGWLRINAHTRRCFQVRERLLYSGGAQAWVEAQPLFLYPADWMAARAPRLEAEDAL

SEQ ID NO: 107409 - protein, 253 aa, Unknown
  Obtained from environmental sample
  misc_feature (1)..(253): Xaa is any amino acid
GYTPTPVSQAEAPEASIPSIAPQISTADDFTPDGFHTFAEELDTQPTPAIERPDWSGVAPAAPAGPPQNLRRVSVTSVLVPETDADQSAAAYDQPLPSTWGSSAAAQQAVASQQAVAAQQAVAAQQAHVRASYAKAAVAQPTAPGQPQFQDPQEQLPVAGQRPVAYQQPVEFSQPHFEQVHYEQPHYEQTVQQPTQSRSPQWHPTNSPVTSSNYPPAFGDTANHPPAFNQIVALPQYYEEEPEPKKGRICGIL

SEQ ID NO: 107410 - protein, 116 aa, Unknown
  Obtained from environmental sample
  DOMAIN (5)...(108): Response regulator receiver domain
  misc_feature (1)..(116): Xaa is any amino acid
MADKKKIIAADDSMENLSILKNILKDKYTVFPVPSAAEMFELLEHISPNLILLDVEMPEMNGYEAAQKLKGDGKLKEIPFIFLTSRDDEESIKKGFDLGAVDYIAKRHCCPKSCLS

SEQ ID NO: 107411 - protein, 142 aa, Unknown
  Obtained from environmental sample
  DOMAIN (1)...(31): Tetratricopeptide repeat
  misc_feature (1)..(142): Xaa is any amino acid
MYSRGIAYYKRKDYDSAIADYTAVLKIDPNYQKALYNRGLAYNKRKDYDKAIADYTEALKINPKDQKALYNRGEAYRNNEDYDNAIADYTEALKIDPKYKQALFNRGRAYRSKEDYDNAIEDYTAPLKIDPSYQKRKSIIVV

SEQ ID NO: 107412 - protein, 266 aa, Unknown
  Obtained from environmental sample
  misc_feature (1)..(266): Xaa is any amino acid
PLITEARLRGEQERKAAEGADRKSKHQEILLRDKITDGFRKDMAAPEQDEAGGSPLTANTRKDAEKHTAKHTEKDRGKDGETAEAGRAAQHGTRAEEAGRAEGSPAPARPRSVPTYEEALAAQDKKAASAPEDNAAPGKPAASGREHSGAAASEDRKNLQPTRGEQDGPGERNGERRQDARDARGDATSARVEIRPHAQGADGSALSAFTLSAQTPQSQEAAAPGQSATPAPLIRQALQQVEQGSLSKLADGGQRLEVQLAPSELG

SEQ ID NO: 107413 - protein, 95 aa, Unknown
  Obtained from environmental sample
  misc_feature (1)..(95): Xaa is any amino acid
MKFVTVRDFRTGSANIWATLPQEQEMIITNNGKPVALLTPLSDKTLEETLSAVRRAKAINATKLLQQQSLRNGTNKITLEEINAEIKRARKERKN

SEQ ID NO: 107414 - protein, 75 aa, Unknown
  Obtained from environmental sample
  misc_feature (1)..(75): Xaa is any amino acid
MILCLNDVEAGGETVFPATGLEVAPVAGQALYFESANRALQCDPLSAHAGAPILSGEKWIATKWLRSQRFVPRRA

SEQ ID NO: 107415 - protein, 270 aa, Unknown
  Obtained from environmental sample
  DOMAIN (102)...(217): HD domain
  misc_feature (1)..(270): Xaa is any amino acid
DSDRILKLADIAIAHRVDSNAVNYPFAHITIKNEIMDVSSHEIRHKISEGGDWQGLVPHGAASIIKERSLYGYRGNSRPEPPPDSVIQRVETAARETLSTERFLHSRQTALQAFDLCRRFALDPMDGYLAGIGHDLAKQIDNKQMLKIVKTAGMDITNLEMDKPNLLHGKAAAVLLRKRFSIHNKDVLEAVAIHTSGSENMGPLAKVIFIADKTEASRNIEPALRKMCREDTLDNILFTVLEKSIAKVKAKGIEISDDVDPLESTCRHAS

SEQ ID NO: 107416 - protein, 146 aa, Unknown
  Obtained from environmental sample
  DOMAIN (12)...(145): Alpha amylase, catalytic domain
  misc_feature (1)..(146): Xaa is any amino acid
MKTWWKDSIVYQIYPRSFQDSAQTEFPDDGIGDIPGIISRLDEIKELGANVIWLSPVYKSPDADNGYDISDYCSINPKFGTMVDMEKLFSEAAKRGIKIIMDLVINHTSDEHEWFQKSREPASPYRDYYIWRPGKWDPLESTCRHA

SEQ ID NO: 107417 - protein, 255 aa, Unknown
  Obtained from environmental sample
  DOMAIN (1)...(254): Phosphoglucose isomerase
  misc_feature (1)..(255): Xaa is any amino acid
MVCEALKHYAGENSPKIYFVSNVDGTHIAETLKEVDLEETLWVVASKTFTTQETMTNANTAKAAVLAKFNGDIASIAKHFIALSTNAAEVSKFGIDTANMFEFWDWVGGRYSLWSAIGLPIALRIGFENYMFLHAGAYDMDQHFKSAPIEKNIPVILGLLGVWYNNFMGADSYTILPYDQYMHRFAAYFQQADMESNGKSIDREGQKVDYQTGPILWGEPGTNGQHAFYQLIHQGTKMIPCDFIAPANSLNSGIL

SEQ ID NO: 107418 - protein, 71 aa, Unknown
  Obtained from environmental sample
  misc_feature (1)..(71): Xaa is any amino acid
EGVPFAIIFTKSDKLGREKIKIQIENCKQRLLEDWEELPQIFITSSEKKEGKEEILEFISVTNDLQNFNEI

SEQ ID NO: 107419 - protein, 130 aa, Unknown
  Obtained from environmental sample
  DOMAIN (3)...(130): Ham1 family
  misc_feature (1)..(130): Xaa is any amino acid
MTLWFASGNIHKKKELAEILCGIGDFELKIPAEAGLCFEPEETGNSFFENALIKAEELYRLLEKQSPGGNIHPVIADDSGICVDALGGRPGIYSARYGVSNRGEKITAAEKNAMLLAELGDNPRRNPRFV

SEQ ID NO: 107420 - protein, 236 aa, Unknown
  Obtained from environmental sample
  DOMAIN (12)...(223): ATP synthase alpha/beta family, nucleotide-binding domain
  misc_feature (1)..(236): Xaa is any amino acid
MLRQRILEPLATGVRAIDGMLTLGKGQRVGIFAGSGVGKSTLLGMIARNTSADVNVIVLVGERGRELKEFIDNDLGVEGLRRSVVVVATSDQTPLLRLRCALAGTAVAEYYMQKGKDVMMMMDSVTRFAMAQREVGLSAGEPPSSRGYTPSVFALLPRLMERAGNFEGKGSITAIYAVLVEGDDMNEPISDAVRGILDGHIILSRKLAAKNHYPAIDVLGSISRLFSTLAVPGGIL

SEQ ID NO: 107421 - protein, 116 aa, Unknown
  Obtained from environmental sample
  DOMAIN (1)...(116): Bacterial DNA polymerase III alpha subunit
  misc_feature (1)..(116): Xaa is any amino acid
VCSCILEHHGITIDLEKIPYDDKKTYAILQKGQSLGIFQLDSPGMQQLLRTMKPDFFNEIIALNALHRPGPLKKGMHTRFCERKFGRERVEYLLPVTENILKDTHGIIIYQEQVMQ

SEQ ID NO: 107422 - protein, 245 aa, Unknown
  Obtained from environmental sample
  DOMAIN (1)...(235): Histidine biosynthesis protein
  misc_feature (1)..(245): Xaa is any amino acid
MVIASIDIQNGKVVQLRQGAELVLQRENSQELASEFDRYGEVAVIDLDAAMGKGSNLEMIKPLLRKAECRVGGGVKTPQQACELVSFGARKIIVGSGAFRDPAKKGAGIAGGEFAVNIPFLDAMSKQIGRERLIVAVDARGGEIVVDGWKTPTGLDLVGAAKLVEPYAQELLFTCVEREGTMTGIDLAPARKLREAVNCQITVAGGVSTLGEIEEIAALGCDVQLGMALYTGKIVGSSRVDLQAC

SEQ ID NO: 107423 - protein, 278 aa, Unknown
  Obtained from environmental sample
  misc_feature (1)..(278): Xaa is any amino acid
ADDTNWYTAANPIPWTEIQLTPNDPGKTVNGWSIDLSGASPYQGDTYQYWPTEPGVTGIPDGTYWLDIRVGDRSGNITTDAKNAMKNVVFTVDRTAPVITPSGTVQPAYGKQTGDLADTLISLSGYATDVNLKNPGLTITASVLVNNQPQNVTLPGMSLGDRTTSSSRVIKQEYAWSLSKDWFNNTFTIDGQYTITITAEDNAGRISKHEDYFTRDTNPPTVKYSNTTRGSAPEAAALIQDDTPVLKGTFTDVHSFIGTGANRYFEWDPLESTCRHAS

SEQ ID NO: 107424 - protein, 62 aa, Unknown
  Obtained from environmental sample
  misc_feature (1)..(62): Xaa is any amino acid
MKNEQQTQKNILVVGGAGYIGSHVVCDLNENGYHVIVYDNLSEGHKEAVCGNDFVCGDSGIL

SEQ ID NO: 107425 - protein, 150 aa, Unknown
  Obtained from environmental sample
  misc_feature (1)..(150): Xaa is any amino acid
MTEFRKGDKISLLGGSSAAIENKLGQGGQGIVYSVKIDGKPYALKWYTCKLKNKEAFRKNMESNIASGPPDSKFLWPLFLTSEQGGSFGYVMNLRPKEYSDFSDILNKAVDFPSTELVINSALNIVNGFRSLHRKGLSVGSSRVDLQACK

SEQ ID NO: 107426 - protein, 74 aa, Unknown
  Obtained from environmental sample
  misc_feature (1)..(74): Xaa is any amino acid
MIQPVTSIDFSEPTEGIPAFLTIIMMPLAYSIAEGIVYGILAFVILKLVTRKHKDVSVVTWVLFVVFIARFFLN

SEQ ID NO: 107427 - protein, 121 aa, Unknown
  Obtained from environmental sample
  misc_feature (1)..(121): Xaa is any amino acid
MNLRERAARDMQDMLGDKSGAGTEFFLKPDNEVEFPITGNYGDIGYLLNTDTGEAVEGRTIEAAFSLLSLAEKTDKEPKRGWGFKCKDLSGKDVSLFVVXYEPDYTVGIGRIKLAVKHESD

SEQ ID NO: 107428 - protein, 147 aa, Unknown
  Obtained from environmental sample
  misc_feature (1)..(147): Xaa is any amino acid
MFFSLEYSDMGNDFLLYGIEPEFLLENPDMGGIGMTKLLRRVRDAGAFIIHAHPFLQAAYIDSIRLVPSLIDAVEVVHGGGGSGKEFTRRNMFYAEEYGLLKTGGTDTHHFDIEGKMTGIAVERRAENIADLAAQIKAGKSRVLEPV

SEQ ID NO: 107429 - protein, 130 aa, Unknown
  Obtained from environmental sample
  misc_feature (1)..(130): Xaa is any amino acid
MYRSAEGKFFIDPSRNFPARAYGDGALVYNNGILVNEGADLSCRGFHMSEVGASVVRGGSADGDKNNVVFLKRGGKVRGEGKPAAADVPINNRVQARLINRYNALFERFDFFTIVVNADNIIAEIREARA

SEQ ID NO: 107430 - protein, 121 aa, Unknown
  Obtained from environmental sample
  misc_feature (1)..(121): Xaa is any amino acid
MLRGQGQSPLRLYRCHTRQEFRWYPCYNFPVNIILFKASEIGKPLARRDERTIHLLKVLHKKVGDSFDAGILGGSLGHGCIESIRLDGSINYSLDLREEPPERFPIRVAVGFPRPIQIKRL

SEQ ID NO: 107431 - protein, 133 aa, Unknown
  Obtained from environmental sample
  DOMAIN (79)...(132): Helix-turn-helix
  misc_feature (1)..(133): Xaa is any amino acid
MVYNCTIEKEGDLYIAQFPDMTNVATCGFTHEEALAMAKEALDGCLEVDILYGNEIPPPVYKGGYPIPVAIHIELALRLRQLRGEQSQTDIAKKLGLSYQSYQRLENPRKANPTVKTLEKIARVYGRELTISL

SEQ ID NO: 107432 - protein, 201 aa, Unknown
  Obtained from environmental sample
  SIGNAL (1)...(34)
  misc_feature (1)..(201): Xaa is any amino acid
MPGRRKILLGLYILEKGLEVLCCLLFALPVAVMAVGWPAWTGFGLAAGVLAALFPGRRWLIGKMPIQDGRQGAAETRTVEWRRALVRFGNLRLAGCLFLTGCVFLFYWAQIYCCLRGLGGRPIWRVCFLLPVVMMAQWIPVGVGGFGLREGAAFYLLPHYGLDPEIAVLAFLCVNAVDILVVLGLWLVSCRWAGRRRKYGM

SEQ ID NO: 107433 - protein, 136 aa, Unknown
  Obtained from environmental sample
  misc_feature (1)..(136): Xaa is any amino acid
MFLYTVLVVHSSHAAHSAAGHGRGFLLFGNICNGTFGGEEQAGDGRRVLQGGAGYLCRVDNTGFNHIYPFQFGGVKADALLFVPGSLGDNRAVKSGVFGDLADWLFQRPFDNLKADFFIVSKGGSIGFVQGNCRLN

SEQ ID NO: 107434 - protein, 165 aa, Unknown
  Obtained from environmental sample
  misc_feature (1)..(165): Xaa is any amino acid
MEARGHEPFQYGCTVHAGEAYGGGWWYRGEDCVTGEDKYTGPANKNLTQNFFIYGVRWNDEYIYYYLRDPETGEELFHWSLNFEAQKEVEETVPPINMKHTLPETFLSDKAFFIIFNLALGGNYTGWKIATPYDPVFADNNPRDRSLQVDWVRVYRYPGTVEEDY

SEQ ID NO: 107435 - protein, 253 aa, Unknown
  Obtained from environmental sample
  misc_feature (1)..(253): Xaa is any amino acid
MLWKNGQGMPLSDEASDGCANSVFVDGENVYVAGHVNDEKGISIATLWINSEAFSLSKGRFPASANSVFAHNENVYVAGSETRGKATEAALLWTNGAGQILNDESSPRASASSVFVSDGDVYVAGSEKDKYGQGIATVWVNGEAVSLSPDGSDAGAYNIFVSGSNVYVAGFEASVSAVPQAPEGVLWANGYAQPYSVERPPAYFYSVFVLGRDIFVAGRQGNIATLWKKWQPIHRANKDSITSFNAIFVQPIL

SEQ ID NO: 107436 - protein, 100 aa, Unknown
  Obtained from environmental sample
  SIGNAL (1)...(35)
  misc_feature (1)..(100): Xaa is any amino acid
MTMPWRPGRFDWKREIKASGLAALWLTLLTGPLMVFKINTADYSLSLRWPLMLKVAGGAFILSAVWRRLLARRASARRAAQRGEADKAQGNRGPARTGWM

SEQ ID NO: 107437 - protein, 136 aa, Unknown
  Obtained from environmental sample
  misc_feature (1)..(136): Xaa is any amino acid
MLGAQAGAARGALPDGEGVRLCVRRRQPGRRLPRQPGAAVGRHRGHVAVPQGGRKAPPGRARPGIHGPGRVAQVGGAEGAPEHGAGVPAAALPRAEPAGAGVGRAEGEVFREHGLQEHRCGDGQAGRGPPVHGGVP

SEQ ID NO: 107438 - protein, 111 aa, Unknown
  Obtained from environmental sample
  misc_feature (1)..(111): Xaa is any amino acid
MRPSSAASVRTRAVSWNDAAEMNDSDVSAALVIPSSSGSQVAGAPFAFTVSSFIILNRCLSTFSSTMSGVSPTSVTCTQRIIWRMMVSMCLSLMVTPCARYTSCTSLSRNA

SEQ ID NO: 107439 - protein, 116 aa, Unknown
  Obtained from environmental sample
  misc_feature (1)..(116): Xaa is any amino acid
MAGIYWPELLPPTLLLAGLSMQPQGNVIRTAMDAGPKKARRRYTARTVAYSGKQLFDAAELAVFEQFYHTVLADGVLRFNFTDPITLKTAEFRFTGAYSAVAADGLWEVAMPLERL

SEQ ID NO: 107440 - protein, 110 aa, Unknown
  Obtained from environmental sample
  misc_feature (1)..(110): Xaa is any amino acid
MVKIKVEPFPCSDCTQILPPIISTILLEIASPSPVPPYLRVVLDSACSKELKIFSCCSGGMPIPVSLTEICRVQMSFPFPARRAVRVMEPFSGVNFIAFPSRLVMTCAIR

SEQ ID NO: 107441 - protein, 108 aa, Unknown
  Obtained from environmental sample
  misc_feature (1)..(108): Xaa is any amino acid
MIFFPSTAASLSPFSILYLFITLLTIECPRRVKSKWPLSSVRCVPATFLIYTGYFKVMRLSSLALVATPPMWKVRIVSCVPGWPIDCAAIVPTASPISTVRFVARLRP

SEQ ID NO: 107442 - protein, 163 aa, Unknown
  Obtained from environmental sample
  misc_feature (1)..(163): Xaa is any amino acid
MNWLSRFENYHFLQVGQEGINHDMVDGIPKIKSASGPWIQNSAGNGDYAFILNGYDLGDPELNARILANSYNWPSEVITEAYRISSTNANPEPYIPVKLLAATAVQQTLTDKAEVLFTQSVTAKPEQFSKTWDDGVKDWLTSGAQAVLDERRTKYREPVSRNQ

SEQ ID NO: 107443 - protein, 135 aa, Unknown
  Obtained from environmental sample
  misc_feature (1)..(135): Xaa is any amino acid
MIRVYPCYARPKRFHNAHRARYVVGKNTRGKSEVTVIGKGYGFFFRAEFLYRKHRAEHFLAHDCHFGRTVGKNGRPDKISVIINRTRELFTAANKPRPLRLRFFYVTEYGVHVRFADKRAHFRAVCRSGRDFDFV

SEQ ID NO: 107444 - protein, 212 aa, Unknown
  Obtained from environmental sample
  misc_feature (1)..(212): Xaa is any amino acid
MATAQSPGAEQVAVAEIGDGEVVHALLDLHDGHVGERVGAHDVGVEAAPVGGLYLNLVGTGHHVVVGQYVTVAGDDHPRPQPLAAALLALLLRLLRAPAPLLLAAEELLERVPAAEKGAVEELVERVVGEDHSVYLRGDHRDDGGHDLFRDIGEDGGEALHCRRERDLWRGLRPELHRSASRAGRFRGEWFRGAENNGYYGGRNKYCRLRRP

SEQ ID NO: 107445 - protein, 174 aa, Unknown
  Obtained from environmental sample
  SIGNAL (1)...(28)
  misc_feature (1)..(174): Xaa is any amino acid
MSNRTLVGRSPSIAPCSPWLIFSNNAFAVRGAPFVSRKSLEMSTMVLPRQLMRRRLSLFTLAMITASRFSAAAAFIKASASSDEQRTAILSWDSEIASSVPSRPAYFFGAASRFMSRPAASSPTETETPPAPKSLQRLIKRLTSLLRKRRWSFRSSTAFPFCTSAPALSTDSPV

SEQ ID NO: 107446 - protein, 136 aa, Unknown
  Obtained from environmental sample
  misc_feature (1)..(136): Xaa is any amino acid
MYVKLKRTNGVRNFFNGVALAMRVVVHGVNAPRVACAVVVGVEYAVHNGVAQQHIGVRHVNFCAQHPTAVRKLACLHAHKEVKVFLYAAVAVGAVRAGFRNRTAREANFLLRLVVHVRQAFFDEQHRPIVQLLQVV

SEQ ID NO: 107447 - protein, 168 aa, Unknown
  Obtained from environmental sample
  misc_feature (1)..(168): Xaa is any amino acid
MEHKMLPLVAFDVVKHLLVKHSAQGRYNQGLCFAAGKERRSVCSGQYFNFAGDIAYIFGAASVNAAAIVKYRRTENVILHILKQSVEKFFLFFVLKLGRVLRSKFRLNGPNAIVAFLLGREETGFFKFRVRRAADSVAVFKNMGGGSQRKFRFCRQARAVFLEKRITP

SEQ ID NO: 107448 - protein, 149 aa, Unknown
  Obtained from environmental sample
  SIGNAL (1)...(73)
  misc_feature (1)..(149): Xaa is any amino acid
MRLGLRRRRRRRGRLRRRHGRRRRFRRGRRGRRRRRRLYRRRLYRHLFLRLRPRRRHLHHLKSLGTLDFLGLNKELAHKRQPYKDEQMENNGDYEHLPKAHIPISGTLAVCRLRPAHQYSLFPSNAVVRNPSFTTPTFCTSEITRTNNP

SEQ ID NO: 107449 - protein, 115 aa, Unknown
  Obtained from environmental sample
  misc_feature (1)..(115): Xaa is any amino acid
MGYPHRRVCGVDALAARASRTHNVNAKIFLANVYFSFVGFGKDRNGNGRSVNPAGSFGGGYPLNPMNSGFKAEIFVYVFPAYRKNNFLKAAEFCLVGIHYFKFPVFCFRKSGNTS

SEQ ID NO: 107450 - protein, 114 aa, Unknown
  Obtained from environmental sample
  misc_feature (1)..(114): Xaa is any amino acid
MGACRRLRYRFETCRGRQFRFDPCRRLRRRFETCRWRKLRFNSCRRLRRRFETCRGRKLRFNSCRRLRRRFETCRGRKLRYDSWRRLRRRFETCRGRKLRFDSCRRLRRRPLVL

SEQ ID NO: 107451 - protein, 554 aa, Unknown
  Obtained from environmental sample
  SIGNAL (1)...(27)
  misc_feature (1)..(554): Xaa is any amino acid
MVAIPKRMSILALAALLALLAQPSAVAQSAVPAPAKPAAPPSAQPSPSIPAAAPSAQPSAPATAAAPRVYMSQTYVDTTVMRALYVLNEASTHYSMSSSAQANAVNRARSILNDLKQKAKGDPNERYVAMKVLEVEAQIYLEEEEMRRIAEDKRILTSNQLITQYNAEANKYRPDFAMVRGIFRRMQEVDTRQANNIADHYNKRYRQVSQEALYSLEKALNSNDAAIARRELEYCEKNKNYLMISSSQLVSQRARLDRLQGASTDMPRVLAALDAGEKAYREYRLSESRASLTMAQNRLNEIREHLPSKEGAEAAARAERAMNALDIREDSLVKLNLAVLDRQGPDAAIEYLQDVLQKRMNISSERASLVDQAIMRVRPERALESKVKMIETDTSGSQKDYEAVLGVQNKAMRRAQEKADSLRKVRDRVANLSNNIYTLLQQNNYKPATRLFNKEREFLASAMDKSAFATLESYVQNGDRAAAAARANLDKNRGRAEEDMARIYGLVEQNNVKEAYKRFNKYRKHLGKYLDREAFQMLEITVTQSYEQAFAKKK

SEQ ID NO: 107452 - protein, 280 aa, Unknown
  Obtained from environmental sample
  misc_feature (1)..(280): Xaa is any amino acid
MTVYSPAGLKDGFFFLNQMYNDGLIDKDFPLYSSDDVPDNLVKSGVVGSLAGNWDHIYRDNTKVLGDLRKNVPDAELVPIDAIQGIDGLTHKRGSPPTSLFWFIPKSAKNPEAAIRYVNWLSRFENYHFLQIGHEGINHDIIDGIPKMKSASGPWIQNSAGNGDYAFILNGYDLGDPELNVKILANSYSWPSEVITEAYRISSTNANPGPHIPVKLLAATAVQQTLTNKAEVLFTLSVTAKPEQFSRTWDELVKDWLSSGAQEILDERRAKYREPDSHNQ

SEQ ID NO: 107453 - protein, 304 aa, Unknown
  Obtained from environmental sample
  misc_feature (1)..(304): Xaa is any amino acid
MKDREEHRQVQFLKIMEGIYKEEIYGSFCFSGEYVQAAFISAEKTMFPSLRVFFQKDVCHIFTYKEFMVCLFEDTPEVVVKRLLEDLSGYLGKYGIGYAITMGSRCREESSGSGIQKTCREAEELVEDTFFYREKKYLSLQDIQDKNSAAADWDYDEEIKKLCSYIQVIDNKMIHSFFNKLKDVFFHSGKTPFTIRQECMELMIEVRGEMIKKFPALKEKLGTGRETLGVIMKQRYLGMIIDTMTEACLQISGCLPLLSADSSFQRIISYVNNNYNEDLRLETLGQLFYYNCAYLGKRLRSTRE

SEQ ID NO: 107454 - protein, 205 aa, Unknown
  Obtained from environmental sample
  misc_feature (1)..(205): Xaa is any amino acid
MQTKKVNTFFTVSYNLNGGTGATPAAQTINAGSGVTLASGTGLTKSGYIFGGWSPLVSDNGIIYSADSSYIPTDNIVLYARWNIVTKYAYTIANDYTRAIDAVYIRKVGNSSWGVNLINSAIAAGAQYSLGTFEAGKYEIKLVSTKLIQTSGISSSIKVSVNRPATSGIKLPSSSIITVYQYIENLLDSNQKISITATGWVSDNR

SEQ ID NO: 107455 - protein, 142 aa, Unknown
  Obtained from environmental sample
  misc_feature (1)..(142): Xaa is any amino acid
MMPVRRAEKIKHLEHGVVEFCDEHGWNSVHGGAFSFLNCSQHQQGVEPLDDCRGRAVGQNSHHSQHKAEAMEKRHGQAYNVFFRKALVVADPQPIVEYVPVGKHDTLGKARSTAGILHIYNIVAIKRRFDFLHFSVISMLSQ

SEQ ID NO: 107456 - protein, 207 aa, Unknown
  Obtained from environmental sample
  misc_feature (1)..(207): Xaa is any amino acid
MKDTIKQAFQDIKNLYGDEIFTNPKKFKGILGDVLGNRGVMAGEAKRLRNLLNIAIVDMRSYVRLKTALAKNEFYAVNNLISEMDKDYDVKTESARAVMECVAELLAYTPQAGQKIGDIIKFCDHDWRVLDIKDGKALLLRERIWDICPYHKIRENVTWEDCTLRKELNDGFYSRLLQPDKARIAKTLVANVKNPVVWYRXAEATPX

SEQ ID NO: 107457 - protein, 102 aa, Unknown
  Obtained from environmental sample
  misc_feature (1)..(102): Xaa is any amino acid
MGGARLYRNVADHALRSQHQARYGGGVFQRGAGYLCRVYDAGLDQVLVLAGVGVETVGVLAAFDVVGHHRGLEARVGHYHTQRFLAGAADDIHADLLVAVQL

SEQ ID NO: 107458 - protein, 134 aa, Unknown
  Obtained from environmental sample
  misc_feature (1)..(134): Xaa is any amino acid
MEDLKNAVLRKTMAKYSRCLLAEIPGETKIKSIGMNYVQFARDYPHLFKFIFFTDRQETTPIVDFSLDENKPLVTRLLKEERGVTDDKRAEDIYIKLGIFCNGIAAMIISKTAKFSDADISRLISEVTQKLIKE

SEQ ID NO: 107459 - protein, 275 aa, Unknown
  Obtained from environmental sample
  SIGNAL (1)...(35)
  DOMAIN (198)...(267): HAMP domain
  misc_feature (1)..(275): Xaa is any amino acid
MNLNKLRLKWKIFAFLLGFCALLLIVLWLFQIVFLDSFYKKIKVMEIKRNAAEIISNIDSENIDTIITDISDNNNITVSITDLNGRGFQENPARNQPRIYPQDNRWRREETAALITKARENSGEIYEYVTTAAEERPRNNTDLDRTEARRIMLPRWQPSQSLIYVKMANNRQGEQFAVIIRAIISPVNATVTTLRYQLYYISCIILFLAVILAFIIAKRVSKPIEKITQSAMTLANGNYDTRFTGKGFYEIVTLSDTLNTAXVELSRLKSCGVNC

SEQ ID NO: 107460 - protein, 159 aa, Unknown
  Obtained from environmental sample
  misc_feature (1)..(159): Xaa is any amino acid
MFWQRRVTDGFHLRMLAQIFHHFERILHVTFHTQRQSFQSLKEKERMERAYSRSRISHQGDPNFYDICEIPHRFGENYAVIAGIWFRQTWEFIVCRPVEFSRIHYHATYNRSVTAYEFGGGMHNHICTVLNGAKQIWWRKGIVHNKRNAVLVCNSCKRI

SEQ ID NO: 107461 - protein, 145 aa, Unknown
  Obtained from environmental sample
  misc_feature (1)..(145): Xaa is any amino acid
MAASDSARMDAASRAALMAPGLPIASVPTGMPLGIWTVLRSESMPSVAQPFMGMPNIGRWVLLAHTPAKWAAPPAAVIITLMPLASAPLQNSDTLSGVRWALATCASKGMPRSCSVWAQCFIVSQSDLEPISTPISGLDIVTPFL

SEQ ID NO: 107462 - protein, 178 aa, Unknown
  Obtained from environmental sample
  misc_feature (1)..(178): Xaa is any amino acid
MPALNPAFHTAVHIVAKVIEPKLVIGSVSNITRVIFLALIVIHVGKNRPDRHAQIAENGPHPFGVPACQVVIDRDNMYALAGYGVQIGRGDGHQGLALARFHFDDFALVQNDGTHHLHVVWALAEVPPCRFPRQGKSLRQKLIQAFTFLITRTQFLRLFWKFIREQTRGPSFFFIDRM

SEQ ID NO: 107463 - protein, 135 aa, Unknown
  Obtained from environmental sample
  misc_feature (1)..(135): Xaa is any amino acid
MAAALPPSRSPTVSPSGARLSPSPCRLPPPAAYLPSLFPCFLQALCSFLLPLLLSRSLSVSLSCILSPPPLRCSPLRSSSPHSVLLSLPQASTSGTLSLSLPSRLLSLFPRPCLSLSSSALPRNSLLCFLSLPRL

SEQ ID NO: 107464 - protein, 212 aa, Unknown
  Obtained from environmental sample
  misc_feature (1)..(212): Xaa is any amino acid
MKPVDVFQNLRRVKQSGFGSSRQIDLGYVTGDDRPRARADSCEEHFHLFLCGILRLVEDNRAVIQAAPAHIGQGRDFNSPRVFHSVYDFVGDEGFHRVVQGPQVRIYLLGKVSGEETQAFARFHYRAGQHQFSQVFGQYQPERFGYGQVCFTGSGRPDAKSNVTGPHSLNISRLPVAPRVNTAEPVGNLDYRIVNSVAFSGDNCPCKRLNIL

SEQ ID NO: 107465 - protein, 146 aa, Unknown
  Obtained from environmental sample
  misc_feature (1)..(146): Xaa is any amino acid
MKFSRRPSTSLTGFLSIIRLNLICFGIFSSFKKIYHHENKLFMPPHTADATFLIPSPIPLITFPTVLTIAFPPSHIACPTVLPAIPPTMPPTAPPITVPTGPRALPIAAPMPAPFAPSARLPTRLHVASPALSRASSPVIFPVANW

SEQ ID NO: 107466 - protein, 213 aa, Unknown
  Obtained from environmental sample
  misc_feature (1)..(213): Xaa is any amino acid
MFAQGPGYGSADRGFSHAGRPHKADYGTRRGINGNTTRIFIRRRRSGRGGFCPRRGGRGFPGRSGDGNGSVPGVISPQFSHREVLRDTVLHVLKTVMIRLQNRLGVFHAEIFRLRIVPGKADYKVKIIARNDKFRRVRLHQVEFFKLLLHGFLYLAFKFKAFDNVLEALVVRTLGVGGHSQLALYRLKFFFKEIIPLRFFYFFVYLFLILGRI

SEQ ID NO: 107467 - protein, 108 aa, Unknown
  Obtained from environmental sample
  misc_feature (1)..(108): Xaa is any amino acid
MIPLLGKGDSLEKVQKMYGLTSEKIANLAKKHQKEAQMWIKNYHIEAGTEHFAKEATEIASRAGITNIFAWSYLGSKYMDYLRSENPELVWKTQIKAFSLTKARNFSV

SEQ ID NO: 107468 - protein, 232 aa, Unknown
  Obtained from environmental sample
  misc_feature (1)..(232): Xaa is any amino acid
MSKGLKPIAAAAGLDRITVFRILNREIMLSGEKYLWERLKGGTSPIDDDLKEIPISPAISRWISIMSDDFCISLKRCDFKEDEAALLTPRGVLSILFVPVFTEGEFWGVVVYSDITKERDFDNDCIAMLRSTARMCVSTIIREEKTQNANNAAETLKRREKMLDLLNKVSLIFLSGSEDKSGDMMAEGVHLIADMAELDRIILYRNHIESDGFHITQVYRWGRDLGGNADLL

SEQ ID NO: 107469 - protein, 251 aa, Unknown
  Obtained from environmental sample
  misc_feature (1)..(251): Xaa is any amino acid
MNELLTKGIIIPNEDRLKDAADGRYEMEKFFDKLNRFVSSNNAFARKSVVIILDEFTYLYKWMKKGKVDEEFMKYWKAMISDYKIVAIAAAQDYIGEFISAYPNQFGTTELIPVDYLVEEDVLEMIRRPFKDNSFMAAFEHKMKDEAINRIIKLTAGNAYLTMIFLDRLVDYLNKTNQPIVMQVTVDTVLQKEILGGNNPFSLEYFEMLYNDDGDIYDTDRPMHNLALLWTVAQQKRATFSKDENQDFGRK

SEQ ID NO: 107470 - protein, 113 aa, Unknown
  Obtained from environmental sample
  misc_feature (1)..(113): Xaa is any amino acid
MIAIKSGEVMYCGVEFSDGGRIYHYRTTDLRINVGDVVIVPVGEDNREQEATVKTVDYCRWDDTPYPLEKTKQIVRMADGKNDKMPFLRFSPKTPLLRSPYESTIDYEVEETE

SEQ ID NO: 107471 - protein, 107 aa, Unknown
  Obtained from environmental sample
  misc_feature (1)..(107): Xaa is any amino acid
MPCVHYRRPIAVFRNQCEIVRDKQYGKSKFFLQTFKKLQHLRLNGKVKGGSRLIGDKQFRVATYRLGDHYPLLHSAGKFKWVLPACIGMKSYFFQKKSGTVAQFCPI

SEQ ID NO: 107472 - protein, 155 aa, Unknown
  Obtained from environmental sample
  misc_feature (1)..(155): Xaa is any amino acid
MGEAERAHPRESARNGSGAYRSLRQASVPRGHQLRAGQRLAAGVRGLVHLRGDARPAPRNQGGEGGHGVGEAYGPPDLRRRGLRQDRGRDAGGFQGGHVRPPSGGTCAHDHPRRAALRNILGTHVELPGAHRGTQPLSKGERGQDDIGKARRRKG

SEQ ID NO: 107473 - protein, 340 aa, Unknown
  Obtained from environmental sample
  misc_feature (1)..(340): Xaa is any amino acid
MDARTVGRGVHAVVLKCGLYLLLLGQPPLKYGVQLCGVYGLGEEVVEAVLKKHLAHTRNRVGGQRYYGQVSTGGKLANMPGRLHAVHLRHHVIHEDEVVAALFHGLYRLRAAQAGVYRHLVKGEQPLRYLYVRSYVVDDQHPGRGRDEGLGRRLGHKTLTYAYPLRQRHREDAALAVLGLYGYVAVHRFHQPVGDGKAQTRSLYTLVLGDVQLHEVVKEHTHILLRYPPAAVGYLYGDDDGIFVCLPARNGERHEALRGVLDGVAQNVQEYLADPDLVPEERVRNLPVHAHLKIEHRIGRLYADDVDDVLYERREVVVGRNDLHHAALDLRKVEDVVDDG

SEQ ID NO: 107474 - protein, 273 aa, Unknown
  Obtained from environmental sample
  misc_feature (1)..(273): Xaa is any amino acid
MILKVDGERDKGELLAFYLCAEKCDLFFVQQQFAPTRGFGCVQTAAFVGAYVQVVHEHLAVDADGVAVGKAYASGADRLDLRSGQHDPGLHPLDNLVVVESFVIFSRDLHSYKIINRTVKKQLELPTRPCRILSLYNGKDNFNNHRHHNRHSRGQPKRAVADARARLGIRVIPISDDPYREPNQHLTHRPQALRAAPAERLASGERLAAHRARVGGKGGDGRRHQRRHVPGRLPHQRLPHENLSARQQPAHLQGQDDPRFRTAQKGHPSGAHS

SEQ ID NO: 107475 - protein, 191 aa, Unknown
  Obtained from environmental sample
  misc_feature (1)..(191): Xaa is any amino acid
MLKWVIISRVPIKANAGSFGGLEFEALDIPKAELVVTDVTPNKIILNFEEVLFFSAVNEKNTNKGGLKESALGKYLNTQFLDALDPVKECLAKNKDGLKVTLPTLYEVAADSDFGKDMNWEDEPRQLKYFKQIKNRIRVYDNDTKWWWLYSAAYGNYFATVSGNGYANASAAGYTSGGVAPAICIIRPPAP

SEQ ID NO: 107476 - protein, 358 aa, Unknown
  Obtained from environmental sample
  misc_feature (1)..(358): Xaa is any amino acid
MRRLFEDYEQEEFDNDEFITEVDIEEIENEEQNKSLSLLEHIDCIIKIHFSMQNHIDDKEKKAKYQEILNKHLSVCSDILGITAFQAHLLSIILNRSGAIMLDKLARLFKATKVQCLKYLDDLDVLAKKRLIRKSSRGYDSDFCYWVSFEVVQALREGKAFTPPRFCGLSKDEFFKQSKRLFSEIIDYDREYGYPRENNDIFLLDFFNLLDDNIQLDFVKNIYNLSLTKPNLVFLTYLCTMFYTKQEEVFPLRRLDAFEFVNDKEKVDIDKLLELKVIEYSGDDFKDKYHVVLTNEALIELLGITEAVLKSKKDSELINHEKIIKKDLFYNENDKRQIEQLVGLLNEENFTKVRDRLK

SEQ ID NO: 107477 - protein, 237 aa, Unknown
  Obtained from environmental sample
  misc_feature (1)..(237): Xaa is any amino acid
MNSNNKNYGQSVRCVAYLKDEFTVEVKGDGTGATGGGNYKPGGKVAITAGTPPSGKFFSKWTTQSAGVVFDDAFSDATSFTMPGGSDVTVTANFGEKYTVEIVNAGENAVGNGQYVAGRLVTIKIGTTPTGKKFYMWTTQSNGVNFDFDYDATTTFIMPEHDVTVSADFGEAFVDNRDDGKTYRWVTIGKQRWMAENLNYDPKNGTGSKCYDNSDDNCNKSGRLYDWATAMGLDEMV

SEQ ID NO: 107478 - protein, 265 aa, Unknown
  Obtained from environmental sample
  misc_feature (1)..(265): Xaa is any amino acid
MLRGAWLKDQAMQPNTLXLNAHYRDNYFLHPKDIERYDKRYGEDTVFPKSYIDQYVYGKFVDSGDSSLFTEIIIDAPPKPGIKVAGYDCAYSGTGDDSVICVMNGNILEAVYVRKTLGDIEMKEFQNMADLKHKPDFWYYDSTGNAVKLKGTGINFANAGGSFANMRTKIYFDLKRKLREGIHVPEHIKNEHWKLIKQELDATSLNLDKESKKPALIGKPEIKKNLRRSPDRADALTLSSIPVKEAIDYERIARESNPWRKTAWE

SEQ ID NO: 107479 - protein, 153 aa, Unknown
  Obtained from environmental sample
  misc_feature (1)..(153): Xaa is any amino acid
MPMDFTVTEISGFQVIKPVGRVDWEGARFLDKEVQRLIDAGHILIVFNLDEVNFICSGGIGALVYNRNKLMHLGGAVYVIADNEYISYVFEALKFDMIFEGYLYKTFEEFSLAVLGSDDGAEKPKKHAATAKKAAPAKEAVKKVKAVKKAKKS

SEQ ID NO: 107480 - protein, 485 aa, Unknown
  Obtained from environmental sample
  misc_feature (1)..(485): Xaa is any amino acid
MNYGVVPLDGVLPRDIDAARGNHRSLVAGLAARLGVEGRFVEDEQVRACAVAVAILNPLVTAYVYLRAVAVVPQKLRAGERPQFRPPLRRQPVGVLALTRLPRALPLPLHQLVVTALVNAQPLLGGHEAGQVHREAVGIVQGEDVRPHKRLAATALRAGNHSPEFFDPLLKRGPETLLLRLDHLFNIRAPLPDLRERAAHLLDHDGGQLVQKRLLEPYLPPKTVGPPQQPPQHVTAPLVGGEGAVGHREDQRADVVGYHAERRARLAAVVDDPRLIGQSFDDGLKDVGVVIRIDPLDHRDDTLKAHAGINVLRLEGAKRPVLLAVILDEDEIPQFAVTSVLAVHAVYRVAVCGRPGRLVADVVVYLRTRPARTCLAHLPKVALVAEAHYPLVRDVCLPFPDLLRLVVAVVDGGEQARLFEPPDLGQKLPRPPDRLFFVVVAERPVAEHLEKXCGDSGRAPPPRGRVLPETRSTSRSGGLAIKPXX

SEQ ID NO: 107481 - protein, 116 aa, Unknown
  Obtained from environmental sample
  misc_feature (1)..(116): Xaa is any amino acid
MFKSITSPSAISPTETLTPPAPKSLQRLIRRAAFGSRKSRCIFRSSGALPFCTSAPQVSSEDDVCDLEEPVAPPIPSRPVLPPKRITTSVGDGVMRTTFFKGAAPITAPISMRLAA

SEQ ID NO: 107482 - protein, 118 aa, Unknown
  Obtained from environmental sample
  misc_feature (1)..(118): Xaa is any amino acid
MRKTQMRKHGNKELSKAQIAYNRYVIIVTSIVDVAAELILELYRQWWQIEPVFKRLKSLFKYHEIPVHVEQSAEAWFYGKLLMAALCETLVNKGRFSPLWRSAHLNKSGLCGVSNGSC

SEQ ID NO: 107483 - protein, 192 aa, Unknown
  Obtained from environmental sample
  misc_feature (1)..(192): Xaa is any amino acid
MDDLHVQQAEEPGAESEAQRCGGLRFVGDGGVVEAQFFQRGAEVFVLSLVNGVYSAEDHRLHLFVSGDRLRGAVVARGYRVADADVGDGFDVCDDVAHLPGAEGWGGNTPHTEESHFVDVVLAACLEEPDRLPFAERSVGDAHVGHRAAEGVELRVEYQRLERRGGIAGRRRDICDYSLQQCGYSLARLRAA

SEQ ID NO: 107484 - protein, 194 aa, Unknown
  Obtained from environmental sample
  misc_feature (1)..(194): Xaa is any amino acid
MARAQKALNFSGGGPLSPPGKWFFVFFPPKKNGKNSFPGFKGNRGFQKFFIPPQKPPLPFFSPPPPKKKFGGGGFFLKKKRGGGGGLKKKKKFFVFSPPKKKKGGGRVYFFFRWGPKRFFGGKKFLKAQRGGFFSGGGWGGVFFFWVGALFFLGERGVFFFFGPRYKERLFLEREERPVQLCAKNRANMGTFIG

SEQ ID NO: 107485 - protein, 133 aa, Unknown
  Obtained from environmental sample
  misc_feature (1)..(133): Xaa is any amino acid
MGRCASETAAAAFIRQRTMENVRVVPEILGFAAVFILVMIVIKLLEKILRDVIEGANLGAVNKILGALFGVIEGFAFVILIIFVLSVQPLFDPSKIFAGSIFAQIMLPLIKIPMGREREVIETVFLILPVLNG

SEQ ID NO: 107486 - protein, 173 aa, Unknown
  Obtained from environmental sample
  misc_feature (1)..(173): Xaa is any amino acid
MPRRSKTELQGLVDKIVYMYISQGKRQQDIADALTSQGYHVSRAAVQRTLKSHARRLKELKDKQDWAETLIAATNKTPRLDIADAGLQIAAMKLLEEVDGVDFADIDGEKKILLLTRVSRAIGLAANVELNFERGRKQGLLDAEKKLEEKAAALGIPDEKMAVIRAEVFGLKK

SEQ ID NO: 107487 - protein, 264 aa, Unknown
  Obtained from environmental sample
  misc_feature (1)..(264): Xaa is any amino acid
MYVAGYVTNNYSSRATLWKNGTAQTLSTSDSSANSVYVSGTDVYVAGYATIGTGISASPRATLWKNGVAQTLNNTQRSNAYSVYVSGSNVYVAGFVGDSSNPKATLWRNGTEQPLSTSASGAYSVYVSGSDVYVAGVGFVGDVDDYHNQRATLWKNGTAQTLNDRYSEARSVYVSGTDVYVAGGVRNDEYENLLFATLWKNGAVQTLNRSTSNASRSVYVSGTDVYVADYSNTRYWKNGDRQDFNATGKVTSGKAISIFVVPKN

SEQ ID NO: 107488 - protein, 105 aa, Unknown
  Obtained from environmental sample
  misc_feature (1)..(105): Xaa is any amino acid
MSVIRCLLSVVCYPLSVIRCLLSVVCCSLSVVRCLLFVVCYPLSVVRCLLFVVCCPLSVVRCLLSAAPKSCKIPAPSRPPLKIGIRHIFRASGVGRRVVGVGGII

SEQ ID NO: 107489 - protein, 110 aa, Unknown
  Obtained from environmental sample
  misc_feature (1)..(110): Xaa is any amino acid
MIYDFAFMGFLYYFFFPAALFETFFLTTGFFFVRPKISLGNRIPKASHALSTKLTFSAFLISSFSSSQSSLLSAGSSTSSIPFLIAARSFSFSPPIGRMRPVRVSSPVIA

SEQ ID NO: 107490 - protein, 165 aa, Unknown
  Obtained from environmental sample
  misc_feature (1)..(165): Xaa is any amino acid
MNNPKEQIANDCIKVLYEMALISPELVSEYTEEFIELLESRNNRLVWGAMTALAKIVSLNPDEIFKNLDTIVRAYEKGSVITVDNSISVFAYLIKANKKYEKRIFPLIIEHLEKCRPKEVGQHAERALVCVNKNNSQKYKETLLNRRESLTEAQKNRVDKIINKL

SEQ ID NO: 107491 - protein, 102 aa, Unknown
  Obtained from environmental sample
  misc_feature (1)..(102): Xaa is any amino acid
MRRAVCFQSPDLHLAKALAAELCLAAKGLLGNQRIGASAASVHFVIHKVMEFEEVNHPAKNRVYKIFACPAVAEHGLAGYGQTGIFEFFFNLLGRRGLENRR

SEQ ID NO: 107492 - protein, 133 aa, Unknown
  Obtained from environmental sample
  SIGNAL (1)...(32)
  misc_feature (1)..(133): Xaa is any amino acid
MTTESKRKIHSWWRPLLLSLALWLGAAFFVGAVEFQYRILEHPLKLAGTENKLVMIFFWAEWCTYCGQLRREVFSDPKVHEVFYRNFLAVSVDIENDPGEVSRKIPGPVPVHPALPQAGQLNHRLFCCGRCDQ

SEQ ID NO: 107493 - protein, 182 aa, Unknown
  Obtained from environmental sample
  misc_feature (1)..(182): Xaa is any amino acid
MAILFSGDFHANVKGEMGFISESILLKKYKENLYKKINYQIILGDTGFLWPGNEEAESIIYKELAKRPFPILYVGGNHEPVLGRSDLPELDIGIGENAVLVRSEEPFIAYLXRXKIYNIENHKFLVLXGALSIDKIYRTPGRSWWEQEYWSDDEKTPFPFIXKEIILTMFFPYRSSRINKQS

SEQ ID NO: 107494 - protein, 131 aa, Unknown
  Obtained from environmental sample
  misc_feature (1)..(131): Xaa is any amino acid
MSLAGFVFGIMSLLLYFMNLFTNHDYTFQNYNMLFGTPLLLAAIPLGICYAFTKKSEKLILYNALLRLIWLITALGIFISMLIKILPMFYQQNLTDQMLMLPLALLFAFHPAGLTEVWEKYLTGFFHRSKE

SEQ ID NO: 107495 - protein, 185 aa, Unknown
  Obtained from environmental sample
  misc_feature (1)..(185): Xaa is any amino acid
MSLPKAVSRSSSEWSRNLILNQRRNVRCLDFVASVEKQQFDKERDTDDGAAVFFDQLTAGVDGSAGCQQVVDQQDTVSRLHGVGVDLNRVAPVFEIVGLRHRFVRQFAWLANRNQTDAEFDGQRSRTDKAASLRCRNGIERSPRSNRSGELPDRLPKGFLVFDQRCDVVKKNSRYRKIGNRPNVL

SEQ ID NO: 107496 - protein, 275 aa, Unknown
  Obtained from environmental sample
  misc_feature (1)..(275): Xaa is any amino acid
MRPLFDLFRKLKAVHFGHLPIHKVYVVDALFVYQGERLGAARGYVAVLHAQAGGYLLKVIQHVAVVVNYEYAHVVPVYIVGRLFIALFGRLSVLQERGEVERGALAQLGLDTDLAAHHLHNVLGDGEPQARAAVLAGGVAVGLLEGFEEYLLLLFAYAYARVRHLHPHHAAVLPALHEARLQRYGALLRRELYGVAQKVHDDLRQPLVVADEHWGNGAVVVDLEALPPLVHLETQGLYDVLKHLLKVELGVRERKLVGLDLRYVEDVVYDPQQVL

SEQ ID NO: 107497 - protein, 175 aa, Unknown
  Obtained from environmental sample
  misc_feature (1)..(175): Xaa is any amino acid
MIASANRASSRPTWNARSTGRSRKPLLRISTCPTSRNAPPGPPRPRRRGSNPWPTGCSPSPPSAATSRQGPPSSSTPKRGSTRRXRRSAAQRTSWRNASPTMPTPADGCANRPRRRALSSVRLRRSLRERRASSRCTTTTARKRRLSPRTDFWRCSAENTKRCLGSRSICPRRAR

SEQ ID NO: 107498 - protein, 241 aa, Unknown
  Obtained from environmental sample
  misc_feature (1)..(241): Xaa is any amino acid
MRLCLSRDGSRAAMPHSGVPCSPPPHGNSTESAPTEPSKRSCNPRRLPLRRLTSSRSRLSIRTPAGRSSGYFKFSLCVTPCTPWLVLGNNALALRGAPLVSRKSRDISTMILPRQFMWRRFWFSSFTLAMITDSRFSAAAAFMKASASQAEQSTAILSWDSEIASSVPSRPAYFFGTASRLISRPLASSPTATETPPAPKSLQRLIKRVTSALRKRRWSFRSSTAFPFCTSAPALSTDAPV

SEQ ID NO: 107499 - protein, 169 aa, Unknown
  Obtained from environmental sample
  misc_feature (1)..(169): Xaa is any amino acid
MGYVPCNHCPCALPNSGQEHFHLLFCGVLRLVKDNHAVVEAPSPHIRQGSNFNCPVLFHTVNYIEGDEGFHCVVKGPEVRIYFLGKVSGKKAKALPGFYHRAGQNQFSHLLGQNQTQSLGNRKVGFARPGGPYAKTNIELPHSPNISGLVFAFGINPTKSVRNVNKRFF

SEQ ID NO: 107500 - protein, 202 aa, Unknown
  Obtained from environmental sample
  misc_feature (1)..(202): Xaa is any amino acid
MKVNAYANLYAAITPGVDFAELSLTFVENRHPRKLLQYLTEIRSYTVEETSPGIYLVTGDYLPIQVIESGKLPERENLWLKSLVNNLKAVNADGILNEIEKSGNKAQLGAYLDVIIRANPEAFTEAMNMARRKRETFEEVFTRAGLIPEWLERGRIQGREEGREQGLVTAARNAMSKGLPIDVIHDITGLDIETIQALQTNP

SEQ ID NO: 107501 - protein, 220 aa, Unknown
  Obtained from environmental sample
  misc_feature (1)..(220): Xaa is any amino acid
MFLKLGRLGEAGKICRDKVLTGQGSPLPPPALIYKSRGLYLIKTVRCHPFAHGECCLAPHFYCXLHCRGTKIKIAVFKPRFFACLAFLVNLKRQNFRLVQYYQFGSGNLNFARLHTGVNHSVRAKTHLPFNSYYILISQFVAYGGKLLFAFGVNRYLRYAVTVTNINKKNTAVVSLAVHPSVKYDRPTVIALSQSPAINSPFHRFHDYSLENHYRDLCAI

SEQ ID NO: 107502 - protein, 131 aa, Unknown
  Obtained from environmental sample
  misc_feature (1)..(131): Xaa is any amino acid
MRMDNSLPNRSWRRFRRQALGPGRRPNSETAPVVDQAPVVDQAPVVDQAPVVDQAPVVDQAPVVDQAPGVELKAPGRGLKTPGPKAPRLXALPNSERKTRGYSVKPKPRYERRKRKRLPRLRASCRNEGRR

SEQ ID NO: 107503 - protein, 165 aa, Unknown
  Obtained from environmental sample
  misc_feature (1)..(165): Xaa is any amino acid
MLKNPFENAGIFAVAWPCKLAVFFTEPVYKEDFWTACFGYFFANFNPVLKVVAHMVAAEGQHGKWVAANIANLQVKGGGGYFGTNYGAHEHTVVPVLCLVNKRNGTWTATAEQNSINWNAFQLFKFRRNNRALLCRSGETAVTVSGWSLVFIGFILHPFFAVPVN

SEQ ID NO: 107504 - protein, 194 aa, Unknown
  Obtained from environmental sample
  misc_feature (1)..(194): Xaa is any amino acid
MIERQECGIQSGNDKILKIYNRNTSLEKIERAAIILADAQRKFGMIPPAYDIICDNPVETKDDIISTLRFYNGLRRPFAFNVSALCAFSGTKLTAYFKENKIECPEFNKMRPTLGNAIIYLIACIKIPDQMFERLLNKVKGFDEKQRKYPILLKMFRSLSLVKRAISHLKVLDFSTITGKWLYPFWKVFIRKQI

SEQ ID NO: 107505 - protein, 160 aa, Unknown
  Obtained from environmental sample
  misc_feature (1)..(160): Xaa is any amino acid
MRFKSGGCFLRVFVKYFRDGNNRRLLRRNPNGERSAEVFYKYAEKSFDTAEKRAVYHVGAFVLSVGIDKCHVKAFGFVKIKLNCRHLPLSPESVFNFYIDLGSVKRSAAFVNLVGHSLGAYRVTQTFQSGVPFALLADRFGGFGRKVRLYFLKAEYIPNH

SEQ ID NO: 107506 - protein, 116 aa, Unknown
  Obtained from environmental sample
  DOMAIN (12)...(94): Nucleotidyltransferase domain
  misc_feature (1)..(116): Xaa is any amino acid
MTQLVEKNWHLVEEMTECLKALNPYKVILFGSYAVGNPTEDSDLDVAVILDSDEIAKTFDEWMDRQSPVSGAVREVRYKIAMDIIVYSKAEIDYLKEEGDSFLEEIESTGKVLYEK

SEQ ID NO: 107507 - protein, 324 aa, Unknown
  Obtained from environmental sample
  misc_feature (1)..(324): Xaa is any amino acid
MPFILNLIHRPEMVPEYAEKVTGHGKKEDIGAKSLLTESLDIFKLQQSIAHKNGLKTTIQMTYASLFNAEAVQIAKDDSREYGDEIALSLLGLPCNEFRDKYKTKDFCIWMFSMEDKKAIVDDVFGKFYEIFGFYPASTGSYYMDAELIIYIKEKYPQVSCAIATCWEEGPKAYRTCNNSWYTLFDGGPWNPWIPSRQNTHAPAADESEDSGIVAIPHLSRDLLACFDGNGSNFGTHPQNVLRGMIYRNGEYPYLFNLIDQYRHLEKYNGGEAYNMVFVGPGWMNKAGRWEVPFELSVKSYEDCMAYYGKLKKKANAPIYTRPI

SEQ ID NO: 107508 - protein, 99 aa, Unknown
  Obtained from environmental sample
  misc_feature (1)..(99): Xaa is any amino acid
MKFPDDIRNIIKRKYQNKHRDWLKEIVLKNNSXVLWPLEINLDIPAEQDAFCQQDAVKTWISAWKSWQGKGDIVWAERRWRSLGVQTIPQKIILLNRRM

SEQ ID NO: 107509 - protein, 180 aa, Unknown
  Obtained from environmental sample
  misc_feature (1)..(180): Xaa is any amino acid
MTESGHLRRQNQKSARTGTPHRHLPALLQRLRRHPGADERRRLQKRRGRIRHRQVRRQGGHRTQMGPGRQEHRRRNLGARHRIREIPPQARLPSGPGPDHARCRRCGQTRHPRPFRPPQPSGLYQSGQLCRRAQGLPERGEKAAQARLQDHYPEDRRLRHGSPCHVHTSRRRCGTRPPQH

SEQ ID NO: 107510 - protein, 230 aa, Unknown
  Obtained from environmental sample
  misc_feature (1)..(230): Xaa is any amino acid
MSAPFSGNWDEPYRTDYKIIEELRKNVPGADFVPIDIVNNKEIYDKVGLQIFIPASSKNKEAALRYLNWLTIPENYQFLQRGKEGVNHQLVNGVPQMMTRPAGDPWFQNSTQNIDMTMPMNGMEMGSEEMNARVLALSYGGFAPEVIVNAYQTSVRNGRASVVVPGAVTTQDGIYGQVLNDKADAVIAQAITAKPADFDRVWDTGLADWMASGGQAVMDERAAIASTVWK

SEQ ID NO: 107511 - protein, 110 aa, Unknown
  Obtained from environmental sample
  misc_feature (1)..(110): Xaa is any amino acid
MLSGKLAQFFLQDAEFNDHFMRFFQRFDHQFFAYLFRSAFHHSDAVFSAGDHNFQSGFFYLFISGVDNKLAVHLADPDSRDGAVKRNIGNMNGGGRRDDRKHIGRIYLIC

SEQ ID NO: 107512 - protein, 219 aa, Unknown
  Obtained from environmental sample
  misc_feature (1)..(219): Xaa is any amino acid
MAELIAAYYSDFYLVARLAVFKRGIEIGQGGDLHAVNRGDNVAAKVDRAAPVLHRIAALLQPRLVRQTAAFCTGYQKARSDRKFRVTHQRGKKLHHRRVEPAAPHFAILYKLVHYPLGGVHRNGKTDPDRTAGGGKYNRVDAYHPAAGVQQGAARVARVNGSVGLDHVPHNVLAGNLDGPSKAGDNAYRKGAFHGKGVPDGEHLLPHFQVAGIAVRHGL

SEQ ID NO: 107513 - protein, 180 aa, Unknown
  Obtained from environmental sample
  misc_feature (1)..(180): Xaa is any amino acid
MSYIYFTIFFYMKIDVLNSSFLQELDSFISQHYAEDYSVKAKGLYANPDEERNKEIQKFTADNKKSFIETLNEMLTKYNEGKKEKLNDVALYKKATVTRQTYHKLLEKDRPSKDTAVLYSLALELCEEDMEKLLASAGYSLATNSKRDLIFKFCFMKKIYNYTTVYNILKARNEKTFKNF

SEQ ID NO: 107514 - protein, 121 aa, Unknown
  Obtained from environmental sample
  misc_feature (1)..(121): Xaa is any amino acid
MKIISLCNPVFFAIENPCGLMRKSMGKPQFTFHPYQFGDGWTKKTDIWGQFNIPKVKHTWETCPKLELYKRPNRQRPSLAFCHKSAKSFITQFADFNIETDAALRAITPPGFAKAFFEANP

SEQ ID NO: 107515 - protein, 187 aa, Unknown
  Obtained from environmental sample
  misc_feature (1)..(187): Xaa is any amino acid
MRQAASTPSRETSTAKKPAATRPKAKGPSGSSGSRKAGAGSSSATPAREKPARMVAVVASLSRAFTLGTSRAEKFSGMAPLSAGLKKVDCRPMRKTTAAMPHQCGMKPVAQRAKAPRSMAASSRYLARTMTSFLGKASASHPPQAENRTKGRAKSAAATPCNHSRPARAARHSAACLKKLSLKVPRA

SEQ ID NO: 107516 - protein, 132 aa, Unknown
  Obtained from environmental sample
  misc_feature (1)..(132): Xaa is any amino acid
MFSFVKTLPLSSKTVMPASTSFSARGRSRVITRSPLLASARMRLSASPSPGGQSSKNAVSSAFCFWLSSGFGSPGIGWLAAKTLLIPSLDEKRSIISRAERGHESASTRICIIRKLLPKPNKRYRFLKTPGF

SEQ ID NO: 107517 - protein, 424 aa, Unknown
  Obtained from environmental sample
  misc_feature (1)..(424): Xaa is any amino acid
MSFSPLAPLEINTDYTITLSAEAHDTKGLSMDEPFNRYFSTRPDDTRPILLSSYPEMYSEITDARAEIKLEFLLPVPLKTLYENVSFSPSMTGIWRLENDGKLAIFTPAEPWAQKTRYEIRFSTSLTDNNGMNIGNDFLCVFTTKIDLEIPYLVNAMRITNKNELITLSTDKGYSSAAESPVENQDWEKDDKLTLVFSKPVDSISVKNYTSVENGPNLIMETPAGYEAEYTFRFESIPAYESRFTLKIKPGIKDTAGNETKEEYIYKIFANGKYSKPPTLAGIRIPMAPTNNRDKELIFYETDSLFNSFPITSENYPSGENIYTWIELYFLTAEDASIDLFSLMELFRIDTSNNVISFSPRQVKDADFSTAEPHIGMEDYQRIEIIGYLTNSTNFGIVNIQIAAGLKDTLGNRSDKLLKISLLK

SEQ ID NO: 107518 - protein, 148 aa, Unknown
  Obtained from environmental sample
  misc_feature (1)..(148): Xaa is any amino acid
MIRREAELQEKLEANQKRNDELEVLLSGFKEEQSRIEDGILSALDRLSQFEEAIEKSLKDKPHGKSVKDTIKSPAHNLPQKKQAVKEELVPQQSETQEEQADTGVFNDCFEIPDDEPVEDILDPLTETLDEEAGEGNSPAEGGELDIF

SEQ ID NO: 107519 - protein, 157 aa, Unknown
  Obtained from environmental sample
  DOMAIN (110)...(130): SEC-C motif
  misc_feature (1)..(157): Xaa is any amino acid
MFTSIVMTDTQEECSICGNSMNPFTGCEHIRGKVYAGEICYSIVSDGKLIGIDFVEKPAMKCAVVFKDIDNPEKYKLLEYIIPKLPNEYTHWDYKISTKYTPHTKFSVGRNEQCPCNSGKKYKHCCMQNPKGVKYEHYEFLLPNELLVNDNLEKDRH

SEQ ID NO: 107520 - protein, 105 aa, Unknown
  Obtained from environmental sample
  misc_feature (1)..(105): Xaa is any amino acid
MLDDPHRHAQEVVYAAHPLGVAPCQVVVHRHQVRPPARQRVKVQRQRGGERLALACPHFCHLALVECHAAYELDIEVAHLEDAERCLAHHGEGLGQYVLQRLPGG

SEQ ID NO: 107521 - protein, 136 aa, Unknown
  Obtained from environmental sample
  misc_feature (1)..(136): Xaa is any amino acid
MDIGFKIFPLAPSNFKKWENFPRTHIKEGENLFSPYENPLGDNWKEKKLLSQIFLVERFPPDRTGSLIKDFQKNKVTQNNSHFCEHSLFVWLDQTIHAETINALALSEHDIFICLDNAVTDQDKVRLDDKGLIKTI

SEQ ID NO: 107522 - protein, 173 aa, Unknown
  Obtained from environmental sample
  misc_feature (1)..(173): Xaa is any amino acid
MRGVGYAAYAYRDAQHILAALYYSGFYRLPYAFRYGHGARFGCFGEDHGELFAAVPGGEVGRTYGALYATGDLAQHQVADRVAVCVVEVFEVVYVCEQHREGTSVSLRPLELAGRYLLEGAVVVEARQAVGCGKFLHLQVQHRPGESHGGVLHHGIKYLFEIGLEELRGGALG

SEQ ID NO: 107523 - protein, 282 aa, Unknown
  Obtained from environmental sample
  misc_feature (1)..(282): Xaa is any amino acid
MRRRGSDCVLEKGYRYFLSFSMTTSMSMGFPIWSSIPAARHLSMSLLKTLAVIAMMGSAFFLSPSAGRARMRRVASKPSILGMCTSINTASYFCGASVTIRSASAPFSANTILIPAPSSNMFKISRLISTSSATRRFLPASASPASAEDPPSPLSVPEHSDPPSTVFPRSAFTVKMNLEPFPSSDSIQILPPISSTMRFDMTSPKPVPPYSRLVPPSACSKALKSLACCSADIPIPLSETVTRNSHTPPAPPAKEASRPISPPSGENFTAFANRFNVTCVKR

SEQ ID NO: 107524 - protein, 135 aa, Unknown
  Obtained from environmental sample
  misc_feature (1)..(135): Xaa is any amino acid
MTAQTRAQRWAPRCRTRRSWSPPGDSPDLTATCSRARRSFAWWCTPGRPSGSWSPTRCSRAGFACPRPARPWPRRSPRCRWRSRWRCCTRSTASTTPCGPARSGHGPRRPAPGMSSPGRGSGSSGHPGPGAPTSR

SEQ ID NO: 107525 - protein, 206 aa, Unknown
  Obtained from environmental sample
  misc_feature (1)..(206): Xaa is any amino acid
MINSRKLMVVGGKKCPALNVIQEFLAYSPGNRKAVFGACSPSYFVHYHKALICRGMQDVGGFVHLHKESGFSPCKVILGAKAAVNSIHKAYASFGRWNKASGLGHYCNKRRLPQISRLARHIGACYQSKRNAPLPSVIRSVKAKIIGDEFTPRQMRFDNRVAALANDGTIHAFKYWTHPAADCRRPCRRLGDIDFRNSLPRCRRFH

SEQ ID NO: 107526 - protein, 240 aa, Unknown
  Obtained from environmental sample
  misc_feature (1)..(240): Xaa is any amino acid
MHRPRPGERARRRLALNVFQTEDVVRYLLRNVGAQLLKHLQPLALVLEERVLLTESPELHSAFQVIHLEEVILPQVVYHHEKNAALKAAHRFRAETLLFLRIAFLNEFPHIVKQLLLVHRLNFHLFRAVQHAEHGLHLVAQTAYAPCLFRVDAFGGIFHHNVFNGVGYLVEYLVFQILTAQYALAQAVYLATLQVHHVVVLFQMFADVEVAALHAFLGAGYRVETHGGLSPRLPACRVCP

SEQ ID NO: 107527 - protein, 103 aa, Unknown
  Obtained from environmental sample
  SIGNAL (1)...(21)
  misc_feature (1)..(103): Xaa is any amino acid
MNMVKTAAVAAARFVVTKILAADTMFSPVMETVEPPLKPNQQNQRMKTPSAPSVRLCPGIALDSPFLPSFVTAYLPIRGPTIAAPTNDAMPPTMCTAVEPAKS

SEQ ID NO: 107528 - protein, 267 aa, Unknown
  Obtained from environmental sample
  misc_feature (1)..(267): Xaa is any amino acid
MRRASRHCRPVIRRTYAGGDAAFCRGAITELTIFIISPCPQAAVSLEGHRVPIACRYGCPVIVRAHLGGGVPACICAIAELAVIVAPPRPETAVGPEGEGVDVASRHGRPVGIRAHAGGCMVCIVVAGADAEQAVAVVPPRPEAAVGLEGQGVAAARRHGRPVGVRAHACGGVPVSVGGTKAELTEWAVSPRPEAAVGPEGECVFKVSRHCRPVGALTHAGGGGVCIEVAVAEAELALIVSSTRPETAVGLEGQGVVDARRHGRPVG

SEQ ID NO: 107529 - protein, 274 aa, Unknown
  Obtained from environmental sample
  misc_feature (1)..(274): Xaa is any amino acid
MRNRGSQLYMAHALAAHLKVGNLYAATVAGNPFITYRLEFTAITLPFLCRPENPFAEEAVFFRTKRPVIYGFRFLYFPVRPVPDHLRGSQPNHYRIKILYVPHYTLSCLEITLRFRNQLFVFLGKRNLFTIIVKNGKIQRKPPQFLHQNVKRFGNARRGGRLPLYNGLVNFGTPCHVVRLDRQQFLQCMRRAVCFQSPYFHLSEALAAKLGLAAKGLLCHQRIGAGGTGMHLVIHQVVKLKEVNDPAENGIYKWLAGAAIXEYRLAGNGKPRFF

SEQ ID NO: 107530 - protein, 146 aa, Unknown
  Obtained from environmental sample
  misc_feature (1)..(146): Xaa is any amino acid
MVTRSPTLVLPAMPTWEMIRHCSPRLTLWPICTKLSSLLSLPMLVTPRVERSIQVFAPTSTPSARTTAPICGILCMTPPMRVKPKPSVPMTAPGLITQEAPMLTPARITALGWTTQSGPRAQSSATYTPGKSTQRGPIRVRAPTWT

SEQ ID NO: 107531 - protein, 141 aa, Unknown
  Obtained from environmental sample
  SIGNAL (1)...(23)
  misc_feature (1)..(141): Xaa is any amino acid
MKKTALLLTIALAFQVASLYAQAGTGPNGPNDFDIANSALGGVKITKYKGTRTNVIIPETIDGLKVTELDSYSFSITDWRQNPTGIVTINSVVLPSTLIAIGQWAFKSQPLTSIAFPNLLRKIDRSAFDGTNSPPLLYPTV

SEQ ID NO: 107532 - protein, 252 aa, Unknown
  Obtained from environmental sample
  misc_feature (1)..(252): Xaa is any amino acid
MAHRGADAGRHLRRAQRQYGVPQSRRLPSRHRYPGGGHEEAEGGHVPDEGLVVHAKFRLELPGLWPYPGERGADLNGRVPLRNVSGVQAGEKGVTQRIRQTQERADRGAAHPGGAPSLGGQQAVLEVRLGAAIVQRRVHRHVVGLLIYGQPVRPGADQLGVLDLVERIDFYRYRGEMLTQRRDALRKVINRRGAARLSGQHENVAQTGGGDSSRLGTHLVHAQVAALDFVLVGEGAVEAAVVAYIGHVERCE

SEQ ID NO: 107533 - protein, 142 aa, Unknown
  Obtained from environmental sample
  misc_feature (1)..(142): Xaa is any amino acid
MTFAVFLQMLYNNSMNYLEMLPVSNIAKYAKGHPGDGIPFTGYPRTNPSEKDKLILVNDPLGPEPVVLEFKLDDILFVEEIPSAVTKAGEGVPLVKLWIKRGAAGVIIEPFEVNEANNTVQLAGRVQAIKERILQTGPQAAH

SEQ ID NO: 107534 - protein, 279 aa, Unknown
  Obtained from environmental sample
  misc_feature (1)..(279): Xaa is any amino acid
MSFINVLISGKKSTLDTWIDEGLSSAAEWLYLGRQVDSKIYDYNNNRSGLLQKGNNFFVWDNHDSESQYAILDDYSTVYLFFQWLRLQSGSANIYREITLSDYYDHLAVTDAANRAMSGNGYDSWETLLKTWLAANYINASSGPYGYKNDGTLKNIRAKTMPSGINSVSLSPGEGVYSITNNFAMPSNKQYIHYAGLNKAGNTLSDSETFSGGALLTYNANTNLKGNAESGTTTGVASYEVTDIGSSRSVAEINLSGPFAIGAWDILRRNGFEKPTSFE

SEQ ID NO: 107535 - protein, 180 aa, Unknown
  Obtained from environmental sample
  misc_feature (1)..(180): Xaa is any amino acid
MAELGVKYLGAWGGHFRVQDGFNRTKAIDQAISTVNIAADYAAEYGMQIALEPQAEADTLFPRYLEGVEFAKSTGRSNVKVMADLNYFLELNQPLEDILKFPDYCLNVHIQGDGGSQPNVGNREEIFIHLFKVLKDAGYDKGVSAACPWVPTNGAAEIDYKYETDKTLAFLQELKAKVYK

SEQ ID NO: 107536 - protein, 138 aa, Unknown
  Obtained from environmental sample
  DOMAIN (15)...(77): Transcriptional regulatory protein, C terminal
  misc_feature (1)..(138): Xaa is any amino acid
MRVQTFGNFEVFVDGNPVSFTRSKTKELFAYLISRKGALCSNNEIIAEIWEERDDTSALQSHFRHLVADLIKTFQSLNVEDIIIKEWKYLAVAPDKLSCDFYEMLNGDVRALNSYTGDFMAQYSWADIYAAYLQNRRK

SEQ ID NO: 107537 - protein, 180 aa, Unknown
  Obtained from environmental sample
  misc_feature (1)..(180): Xaa is any amino acid
MDRASPRAFLHAAAGGRRLCQPSLRDRAHPSSALPAALLRRRRLLGASARHTGRGSDQPDQHRDPQPALRPRPGRPHRAHGRDAGLHDAQAAKSPQPAGFEAHPRAPRLSGWQRGQDHDAKHRLHQGAVDCPRGLGAHPHLRARQRDDQRGVHHQLHGAAHRRHHPEQTYHDRPPQRDPE

SEQ ID NO: 107538 - protein, 138 aa, Unknown
  Obtained from environmental sample
  misc_feature (1)..(138): Xaa is any amino acid
MPGEMALKELETLCYPASAYEFEEYLHGPACCTDERTALFLFPHGDHDDVRMKRLAEIVGAATDNVYFITFDETWQGEKALRLQTPDRDFFAPLSAIFFAQLLSALMPEKCGRGRHAAVKNIFAMMDTKVPVEQAAGG

SEQ ID NO: 107539 - protein, 238 aa, Unknown
  Obtained from environmental sample
  misc_feature (1)..(238): Xaa is any amino acid
MRSSSWKGRYAXKLFETKLFLFLSSLHKDAPRLVFEKLREFVMDKSLLYKYTKSIAFSIGNAELSWQKKLLRKILNYIDSDDQTRSTAMEILAIALWRSKELVFSLTEHKYRELCHKLCDCLERDLRSVAKEKKGYLALSRHLELLLALLRMRESENEACKTLLAPTKELTRQYAALVNEAVRLLRESNFVMQSRIILQVEKPEQFRNTPDLLYALRMYLTGDSGANTIWIARIDNDE

SEQ ID NO: 107540 - protein, 215 aa, Unknown
  Obtained from environmental sample
  misc_feature (1)..(215): Xaa is any amino acid
MSTMASAITVVNSVVYIGGNDLNGEPAGVKAVYWKDGEKIVLTENSGNASVSAIAVSGSDIYIAGNEEAVNVYWKNGVKTALGDGTTVSSVDSIAVSGGDVYTAGREINEAGKLTAVYWKNRKKTVLTEGSHSGLANAIRVNGQDCYIAGRTRIRTMSVRRYTGKTGSKRRFQKGPALLRRRQMIFSLLRKNKKIKGAENGRKNRHSCPTGYSTG

SEQ ID NO: 107541 - protein, 153 aa, Unknown
  Obtained from environmental sample
  misc_feature (1)..(153): Xaa is any amino acid
MEGKNNQQNNKNKSPYVVLIYTTVLIFSFLICYKIICAEISFDFKFNDLLTLLISLFAIGNVMAFYFKTTETSNRFYDNANXFYTDXRSTFNGYESGFREMLQITKPENTALKINRHIYLRKKRLGKNCLIMKPTSKKKLIKNCKKKWATPKN

SEQ ID NO: 107542 - protein, 123 aa, Unknown
  Obtained from environmental sample
  misc_feature (1)..(123): Xaa is any amino acid
MQAVQFQHLADVFQGAVHCQQLVGIREIHPVETGMPDRRTAHAAVHFPRAERAQLPHPGAHGRAAHDGVVHDHDALAVDHLPHRVVLHPHGKFAHALGRLDEGSADIMVADEGRVRRANPRPI

SEQ ID NO: 107543 - protein, 279 aa, Unknown
  Obtained from environmental sample
  misc_feature (1)..(279): Xaa is any amino acid
MGSSYRTKLGFGNFGRIIHAGGQFAAFFGFHVFFVPQTLLGRFFINLRQFPMFKPYRNKFGNAGFFHGNAQKRTRSGNGFFIVGNDNKLACTAKFPQKLHKAAYVGLVQRGVNFIQQTEGTGFYHVSCKQQGNGGHGTLTAGKQGNMFQLFAGRLGKNFYARFKNMVDVGKLQFRPAPAEKTAEHIMKILFNAVVCFGKQFRGFRTDFGGKILKVFAGFFEVGYLVTQKFIAFLGLGKFFRGHKVDRTEVFHVGLCRGKFFPQIGRMRGNGKNTLLKFH

SEQ ID NO: 107544 - protein, 133 aa, Unknown
  Obtained from environmental sample
  SIGNAL (1)...(30)
  misc_feature (1)..(133): Xaa is any amino acid
MHSSMALASSLSPLTCLCRRSNFLPRLSMSASKSSVAMVSMSRTGSTPPSTWAMFSSSKQRTTSTMAVHSRILARNRLPSPSPLLAPRTRPAMSMKSTAAYMVFCGLTSSARRSARLSGTGTVALFGSMVQKG

SEQ ID NO: 107545 - protein, 165 aa, Unknown
  Obtained from environmental sample
  misc_feature (1)..(165): Xaa is any amino acid
MSRNVILPCGVSTMYAPMCCVIPPNSPDTTSAFRIASNSLVLPWSTCPITVTTGGRGSISAPSSVPVSMMVSSYRLMIFTSAPNSAASIVAVSASICWFIVTIMPSFISFCIKSDAFRFIFLANSDTEIISIISIDLGTGLATYVIFFLVWRSFSSISSSFSLRL

SEQ ID NO: 107546 - protein, 160 aa, Unknown
  Obtained from environmental sample
  misc_feature (1)..(160): Xaa is any amino acid
MGVNEFIKRPFWEFHRYIVNRGLKRRESAAGDGVYYFVQRIADGDFRRHFRDRVAGCLARERGRARNARVYFDDRVVEAVGVQGELDVTAAFNAKGADNIQSGKAEHLVFFVSQGNGWRDYDAVAGVYAHRIKVFHRADGNHVSVAVAHNFVFNFLPSGY

SEQ ID NO: 107547 - protein, 324 aa, Unknown
  Obtained from environmental sample
  misc_feature (1)..(324): Xaa is any amino acid
MTAPAVQSRPELLTLRVPAFSVFVMSPSENNPAPTVXSTVIVPLFTISCALNPRAVIFNIPLXSIRLPVVSVPVATIVRVLCSSTLTPLGAVMFAASILNSFADASIKRPLTPAAPKLIMPVSVMSLSIRSAPLFVAAFPNMTMRFWPVCVSDVARTVDAPSPSVLLMPEIESAAPKVMSFAAVIFRLLSSPASEIVPAMLTASASISNAPPSMRVFTAFRLPAVKPAPIVMFLTSSVPPSDMPPPVTPINALFDTDTPSATVILRPAPALMSSRPSETDTDWKCLSVSGELLLSPINVIDAAPPVRLSKSPIASFPALIARIP

SEQ ID NO: 107548 - protein, 208 aa, Unknown
  Obtained from environmental sample
  misc_feature (1)..(208): Xaa is any amino acid
MKFLTFCYNFADRRFLFHSGRTKIVFSINATPNPCPDGRRAGRNRRTPSRYRRRNGGKRLIAGGVRRGLHPRRTERNTHVPHPIRPLPQRRRKRAGDAALPRPHVCGHTVFAVEQSEPAAPLRQPGVAEGRLSKRDDNRAPALPPLLAAILRRRPAFRRPNSLFRDRPAKRPVVRPIPGSDLLPGAGNPLGERRLRPKHPEPAPEPPA

SEQ ID NO: 107549 - protein, 128 aa, Unknown
  Obtained from environmental sample
  misc_feature (1)..(128): Xaa is any amino acid
MIILDYIIGNTDRHYGNFGIIRDANSLEWIQIAPIFDNGSSLFYNNELLDTVQNKIDSKCDWFPGGNQECLTLINYPFWYDKNRAKDIPQIVFNGLNENKRLDKVRINEIVNIIEERTKILENIIDRK

SEQ ID NO: 107550 - protein, 129 aa, Unknown
  Obtained from environmental sample
  misc_feature (1)..(129): Xaa is any amino acid
MRKKGLQGVLGKTVKLPVVLLHVNVKKMARQFRNILRTMAQRRNINRQHVKAVVQIGAELSGLYKFFNVFICSGKNPHVGGNGNVGAYFFKFLFLNNPQNLCLKRQGDVAYFVQKDGACVRHFKTPLPV

SEQ ID NO: 107551 - protein, 332 aa, Unknown
  Obtained from environmental sample
  DOMAIN (11)...(231): Domain of unknown function (DUF1745)
  misc_feature (1)..(332): Xaa is any amino acid
MSKKLPFDIIGMTTIASANQHGQGMFSLSLTVLTSDEIVFETAMAGSLDTGNHREKIKAAYSETVKKLPGEPSMIFTFFPFLNELSGTQLHKDFDEICGGIPFWGSLASSPDVQTGHWFVFRNGDIDSKGIAMILVHGPIDPEFIVISLPSESIRKARGRITGSNGCCLKEIDEIPALKYMENIGINIQKGVPIVMPLIVYYEGSAEPVALGVYAVNDDRSLMCAGEMPVGATVAIGEITVEGTLSSTAECMERVRKTGKRGGALFLPCITRYIMLTPIHDREMSLVIEKMEEGRYMPFSMAYSHGEICPIKDRIGVLQNRFHNFSFIACVF

SEQ ID NO: 107552 - protein, 233 aa, Unknown
  Obtained from environmental sample
  misc_feature (1)..(233): Xaa is any amino acid
MYTRLRISFLKQDPPKPTLDTKKRLPMRLSIPIVRDTSVTSASVFSQSSEMLFMEEMRCAKKAFATSFDNSALHTLLVTIRSRGTQFAYISTTCSRAFIPSGVSCEPISTRSGLLRSAIAVPSARNSGLESTSKWMPFSLALRMLLIASAVRTGKVLFSIMICPPRETFTILRAVRSQYCRSAALPAPSPKLLVGVLTETNMISASSIAASISVEKKRLRPCACFTTSKRPGS

SEQ ID NO: 107553 - protein, 147 aa, Unknown
  Obtained from environmental sample
  misc_feature (1)..(147): Xaa is any amino acid
MPLGKGDYLRGKXCVKFGLTGGTVHNYVGAPLTEGKADKLQGNYAGSLVKQLVERMLSVGSRLAKDHRPRVIRNRLPVAVYLLAVGFHVKLLQMGGEAGKALAVGQYRRVGITQEIPFPHANQGIQHGGIFGNIRLHRQFIRFLRAG

SEQ ID NO: 107554 - protein, 367 aa, Unknown
  Obtained from environmental sample
  misc_feature (1)..(367): Xaa is any amino acid
MQVYHDEGGRLYLFHNTLSDADQTVLIDVQNDKHFAAIDCASGKMIEIEPYEVERNTARLRLSFSPLQTMFIAASSVKQAAQALSTDLPSPFMLPQRTYRIIFKEQWDFEPRSPSVLPLSSWAVRIGLSRESGQISHFYEATFEVRDIPPETVLMMNGMSPTKAPFHGVEVMVNNLRIDNEPEIGAKSAPGAHLISIFGEQAKCFNISKKIIKGLNRISIRTTGTAIDPQTLVYPPMIAGKFSVIKGSHGLAIDKIALLAEHNSWTKHGYPYLSGRGCYAQTFEVPNDYDRLMLRFSKTSGTVYIRINEAEVGMLHWSPMEIDVTKYCNAQRNRLEVEVVNTVDNVLRLGGRPSGITGEVYIDVYKV

SEQ ID NO: 107555 - protein, 177 aa, Unknown
  Obtained from environmental sample
  misc_feature (1)..(177): Xaa is any amino acid
MMESCAARAAREKRPRGARGTRYPRGERARKRRYRKRRHKKISLPYNRRSFRGERLYPRRGSRDTLRINAGGLPYGLPLLHDRAAGARRAARRGGYPEPILFAAGARRDQQYCLYGHGGTARQYGRGIGKHCRSDRALGNGDEPAPHYGLHLWYTGGTGTASRGNRGTRGALPAQPL

SEQ ID NO: 107556 - protein, 170 aa, Unknown
  Obtained from environmental sample
  misc_feature (1)..(170): Xaa is any amino acid
MGRAQRTAPQIRGTVSRPPGFGGLHPRRTEARRGDHSGGASARRFGGHPGHAGRYSQALRRRRGSFGGRRHEDPRLADEHAEAAPGGDLPQNAAIDGQRPAGHHHQVRRPRPQPAHAQLLGARQDQGHSHGDARHLLPSGAAPRHGQNKVRARRPGVQAPVSRRVQRHRI

SEQ ID NO: 107557 - protein, 219 aa, Unknown
  Obtained from environmental sample
  DOMAIN (39)...(151): Phage P2 GpU
  misc_feature (1)..(219): Xaa is any amino acid
MVSLSGIVATGLEFALGQIGLGSILGVFGPVIFQVSKDKVRTWEQLRRTSEVTYVDHEVINQKPVSEFTGPGLDEIEFTIVLNGSVGADPGSDMEMLRTLMKFGMPQFLLLGGAVLGRFTIRQLDETWRYAPKGRPLVIALSMTIKEYVETVPTSGEGKQQEDEARRGETGKGGPQRLPGTGAPSQTRSLTPQIDPNTHMVVNGPSGGGDSLSIFDSDL

SEQ ID NO: 107558 - protein, 112 aa, Unknown
  Obtained from environmental sample
  misc_feature (1)..(112): Xaa is any amino acid
MPKYMQIAKEYEHSLFVASRKEIFDFLSKELNGKFTVILKPDNCSFSGAKAAVCMPGTAVLETYNAGVPTIAVVVTDLFTYIFGKLFFKTKYLTLPNIILGKEVVPEHIFIF

SEQ ID NO: 107559 - protein, 141 aa, Unknown
  Obtained from environmental sample
  misc_feature (1)..(141): Xaa is any amino acid
MIVAEGGALSYIGRDSGLKTARRLLKKNGYIEISDLILRSKTLSREVQDIFLSGLNNLDLETEESYRTLLKVNGFEIVFCSYIARQYWEMYYENIKRNLKNRRGFFSDKNVRAAFNKEIRFFYKRKDLDQIGYLFIVAKKR

SEQ ID NO: 107560 - protein, 507 aa, Unknown
  Obtained from environmental sample
  misc_feature (1)..(507): Xaa is any amino acid
MPSISKGRVFFLXQEGQNRVFGHAHGLIGYAVDEIRDADFLASGYQLFPKRFLEVLGHPDQAVQAAVAVDEFALDDVILGMAHETGALATAAHGAGQGAELHAAGGIPGVVAVNGHDAVAGRQNGGDAFATTAGGHGVVDQAVETDIGDGLAGGFFNEVVGALENAQLLVRAFALFNGLVGAGGVDFKAGLAVHPVVGSAEAGPFRADHADMVGGEALAQGAAVIGIGGLVGHVLHAGIPVRIDGPGLVADLLGFLGVGVELDLELVEDGAEVLVELGVQDGADVFQLEALGHGVVGDADHANVALAGVHHALGIVQEMVDLPLQDGLEVLLELAACHFDLDGQGQGTAGLDALQAGAEKLDLAVLHLLHGHGSDPFNCAGMGTAAHFHQVFALADALALEGRAVGHGDVNLGDRGLQAAHFHGTLNDFMVFNVGHHVFVGADAGGQDGGNVGVGQGRETPVDAAGGVGGPFGVDFAEGVDEGEDAVLVIKKHLLVVARAYPALGLF

SEQ ID NO: 107561 - protein, 108 aa, Unknown
  Obtained from environmental sample
  misc_feature (1)..(108): Xaa is any amino acid
MPVKMPAPRAWTERPHEPSLHLGVGFRRRVRRIGGRLRSPASGPGGAVLEIPPLRRLRPNRASEKDAGTVPGGQFDWGGRLPKSNGGIQRSPRAGRQPASRAQRQKVA

SEQ ID NO: 107562 - protein, 285 aa, Unknown
  Obtained from environmental sample
  misc_feature (1)..(285): Xaa is any amino acid
MAGALSSLGGFGLLRPVCVGIRFALRFGFGVMAFGRHHDLQRSRDIGVQAHPHGMFAQGADGRVKQDAAAVNFHPCGAQAVADEGVGDGAVEFVVFAHAHFNAHHVAFQFGSHACRIGAQGVHLGLKLFALQFKHLQVGGRGGHGKPLGQEIVAPVSVFDGDHIAEVAQVFHVGPEYDLHCQAPLHRALFLDIAGVCCRVDQQGHLAGAFDFAGQVALVLRADAGDAAGDDLAAFGDEVAQDVRTLVIQGQILVRAEAAEFAPGSEFFLESHYAFSSAGCSPRAR

SEQ ID NO: 107563 - protein, 237 aa, Unknown
  Obtained from environmental sample
  misc_feature (1)..(237): Xaa is any amino acid
MFMVYQASITIGVPCCSFNCTQRLRSCGLLSETTVIDCVDAWSVTEPGSSLIQPPGMGPSAVCFTTNVKVRPFTVAALSTSSNVPAVAPAGSPGFAAAVYKSVFSLLGSRNSSENVTMSVSLPPSKFSYILGLPPPAPSLGSPLASNGPIPSYTSNDFSDAAAPPAPPITSTSPVPKPVIEVLPVGRSAPLNTALRTRSLLAVISAPDAVSVTPLQLSVTVLGNLTPAAVSEALPSL

SEQ ID NO: 107564 - protein, 108 aa, Unknown
  Obtained from environmental sample
  misc_feature (1)..(108): Xaa is any amino acid
MGTHARIRSIHAVHIGINFTLFRLQGGSQRHCGGIGTAAAQSGDLPRVRNALKAGHDQYIVSCQLGAQPVGVDGKDTGVAVVVTGGERNLKSKHGTRLHSRILEQNGE

SEQ ID NO: 107565 - protein, 113 aa, Unknown
  Obtained from environmental sample
  misc_feature (1)..(113): Xaa is any amino acid
MQVVEEIRQVKFASILQAQKAYGICGMNTIRTWIKKYGKEELLPKRVRVETMREIDELKEAKKRIRDLEKALSDAHMDYCLERAFLEIACEQMGTSREDLKKNNAIRLADVRR

SEQ ID NO: 107566 - protein, 422 aa, Unknown
  Obtained from environmental sample
  misc_feature (1)..(422): Xaa is any amino acid
MTITGRIPDTADGRLYQIQIGAFKIIQNAENSFEKLKNASLNPSFEKYMDYTRVLIRGVKASDIPYLIERIKSAGFYEIFIKLDSGNIMTALPPVSTAALPSEGLREIGHITIKVGETKSLSGFIKDKNVTSWRSSTSSAVKADSNGVITGLNIGNGFISINETEYISAAVVPSENFYVLPESQATRLPRNSRVRNSATQNITEYCTEPTFRLAYRFNNKGERRGASGGNGGIDILGRGDNYEWLWTTYKQGGWFYDLNGIQREMINGYQKDPSNGVELTVKPEFVYENGITYLQLRNILYNPGNNPVTGQKFGASADIMINKNDDSPLLHKPYGAYMTDSETNPSLELMFVCEAGEGINPVDTLWMGRYGSGTHLNHIYDDNREEVRGEDSAIGFSYKNIDLAPKQKKEFIVRFTLARTEQ

SEQ ID NO: 107567 - protein, 117 aa, Unknown
  Obtained from environmental sample
  SIGNAL (1)...(40)
  misc_feature (1)..(117): Xaa is any amino acid
MLLRNSLERFTTVFPFQLITRRFSFVTSAIITASRFSASASSINFFASFFAVTTDILSWLSLIASSVPSSPSYFFVTLSRLIKRPSASSPTETLTPPAPKSLQRFISCAARGLRKSL

SEQ ID NO: 107568 - protein, 140 aa, Unknown
  Obtained from environmental sample
  misc_feature (1)..(140): Xaa is any amino acid
MCDFLLTHFVRYKIIFAAYVGSVVASVAERRRRHSHVNLRRPGVSEASDDLLAGGAAYYGVVYENDLFPLHVCGERVELLPHGAVALYLRGIDEAAPDVPVLDKARRERNTAHRAVAACRDQAAVRHAADHVGVHRVLLS

SEQ ID NO: 107569 - protein, 308 aa, Unknown
  Obtained from environmental sample
  misc_feature (1)..(308): Xaa is any amino acid
MVVAQALRDHRAKLVRVYYAQVSVGDQGHLHDFHEILRGVRPKLAYRFVVAAQRSVEGGLHGFAYKRVGSGEHLVEHDAEREDVGAGVHLKVVYLFGRHISGRSHRRAALRYGRVRRLHHPEVGEFRDARRFVYKDIRRFYVAVDYAHAVRVAHSRGDVPGDTQYPVKRQRSFLRYEPIQVLARDVLEGYPRRAALLSRVVDGDDGRVVEHGARLSLYGEALQKLALNRRLYVAVGGYDFHRHAALQDRVFGEVNPPHGPLAEKPDNPVAAEAFSARAVALIRVFFGMPLHFLKITIAHGPRGYYFYK

SEQ ID NO: 107570 - protein, 235 aa, Unknown
  Obtained from environmental sample
  misc_feature (1)..(235): Xaa is any amino acid
MSDCANADFGFFSGMYTSLPFTTTCPFTSSRFTTTLISSTGTQSGAISVTSSVMYDGDPPMDASPPGPTSITRSSSSSSPLSLSSGNFTLTSSSGPLETTAAPDLSAFRISSSASAIECGSKMASRWPRTMSESPVLSHVLTSPTGVSWLNLPPEKPTALVNEPGPCWDIIENQQSLVSLNSFHHSLVPCSALPRSFRSSAKAPAFSISNASKSPFFASTDSGSLSFHHCGRGLV

SEQ ID NO: 107571 - protein, 315 aa, Unknown
  Obtained from environmental sample
  misc_feature (1)..(315): Xaa is any amino acid
MRLVGLAVGGHYVRREGHYGDRVAHLGQLLHRLQTVHHRHVHVHEYEVERFLALGRFRGDRLHAHLAVLGYHRLYAHARQVVGDHYLVHLVVFADQYLGVEVGLLHVRRAAAGAVAERLGLRALVAGGEGYVKMELAADAYDALNFEVAAHKLHEVLRDGEPQTRAAVLARGAVVGLRERLEHLGQLLVVHPDAGVLHLEVDGRVFLGLVYNRRQNLHHAVVGELHGVRQQVQDDLAQAHRIADELLPERRLRVAEEVYALRRGFGSDNVLADFEDLVQIERDVLQDDLSGLDLRNVQNVVYDAEQPFGRRFYLV

SEQ ID NO: 107572 - protein, 106 aa, Unknown
  Obtained from environmental sample
  misc_feature (1)..(106): Xaa is any amino acid
MTDIFWPEYLPAELLEDGLNIQPQSNVIRTAMDAGPKKARRRYTARAVKYSGKQVFDMAEMAVFEQFYHNVIADGVLRFNFSDPVTGETAEFRFTEDYIARAGKES

SEQ ID NO: 107573 - protein, 149 aa, Unknown
  Obtained from environmental sample
  misc_feature (1)..(149): Xaa is any amino acid
MAFPLLRDQVDERFRVGFGMEDIAFVQQTIFDLLIIFNDAVVDQRQGAVVGSVRVGVALGRDAVRGPAGVPDAGHGDDIGASGQFFFQAGQFALRARHSQFSPLDVGHAGRVITAVFHPPQPFHQQRDSRAAAGIADDSTHVTLPIFPG

SEQ ID NO: 107574 - protein, 113 aa, Unknown
  Obtained from environmental sample
  misc_feature (1)..(113): Xaa is any amino acid
MMGEYKAAQDVPELEDYIRKLADLRRKHDALKYGGYRQVYLEYHRPFVFERFIDNERIFIAVNVGDSGDTVNLNKYHGGGFTDLLSDERIPPESANAVQIAPHSVKILTLIPI

SEQ ID NO: 107575 - protein, 205 aa, Unknown
  Obtained from environmental sample
  misc_feature (1)..(205): Xaa is any amino acid
MRSESALRLTTPAVEVSAGLSSGEARFCNSSVENASLNPARSFSVLAHIRRAICKKSSGRLSVALGAGLTSALGLIFVLASTALTLVPTPGLTTGLTLGLTPGLGLESGLTAILMLELIAGSTLRLTAALTLIFGLAATFASVLILGLILGLTLGVAIGLMGGITLGMTALFDRGAVCNNGISGGSGICINAGNDLRITLGLPTG

SEQ ID NO: 107576 - protein, 379 aa, Unknown
  Obtained from environmental sample
  misc_feature (1)..(379): Xaa is any amino acid
MFSLFPCWLLSRAFCTPGGGVPRVRVPKVRAPQEARNIKGAKGRSRKMTYKNKVITLSSVIAALAIVYILTIIFDPQNRGARSDVYSWLEPGLNNRIAGIRITRLGEEPVNLSHNNGEWFVTRGGKDYPARQARVEDLLTALAKRDAYPVRSSSASSHERLWLTPETATQITVFIAPGLPLMTLLIGQTDITGQNVYLRKQGQNEVRSGEDRFSSYTNSPLNSWYNLRLFPENEEGKLIDTDVQRLTVYAPSGVEDEEAHSGGSQQPMIFTRSNREWTFSFDIANPDFSKVDAYIKDILGVSGDDFISGVSASDPMFNSCRVVMEFGNGATKTLRLGPADDNGKRYATVSGSDFVYSIPAWAVNKIFVNKDYFAKSDNR

SEQ ID NO: 107577 - protein, 183 aa, Unknown
  Obtained from environmental sample
  misc_feature (1)..(183): Xaa is any amino acid
MYPTPTEPRKSAFIRWGGGGGGGGGGENFFFEKNFGGVPPQPFLKIFFLPKSWAKKKKIFFFPPKPPKIFWPRLFFCQKFWGFFPPFFFPRGFFPPGGGKKTRFFFLEKGKKQKFFFPGGEKIKRFFFLKKDQPFQKFFFPGPFFWKNPRNFPPPLKKKNFRGKGGLKFSGPLLGQGPCPLFI

SEQ ID NO: 107578 - protein, 243 aa, Unknown
  Obtained from environmental sample
  misc_feature (1)..(243): Xaa is any amino acid
MEAGTCRLELAGSMLAVYFAREMFSGHQASYGFVLNKDTFERLDIGQVTDNKYKLTSGNFIPYTSHSFNQYILPIDNGFVFADHGDAYPRAFTFGKYQNEKSTKRLDAFRFPGNTGANATYAEMGGLAKTTNGYIFAGAYGRDNSNPRNLFILTFDEDLKSCSAPVYLTKYTKQDGHSGHPKIVKVDTDRFLLLWEYFEFSTQAANIILSNRTGYISTYMLLIDEKGSPVSEPKGFKGNSSEH

SEQ ID NO: 107579 - protein, 158 aa, Unknown
  Obtained from environmental sample
  misc_feature (1)..(158): Xaa is any amino acid
MTWEKSELRKYLNGEFYNKFTKEERARIAEMSIKNSNNPWYGTSGGSATYDKIFLLSIEEIVKYLGDSGKLQNRPANDGRFGWWKAARGFWIDDEFNENRMAADKSGTASWWWLRSSGYDGLHTAYVYSDGTVHINGTSGRRLNASDGSVRPALWLNL

SEQ ID NO: 107580 - protein, 163 aa, Unknown
  Obtained from environmental sample
  misc_feature (1)..(163): Xaa is any amino acid
MRQGRGVVYAVAHHRHFAAALLQLLHLGGLVTRQHLGEHAVYPHLFGYGVGGLFVVAGDHGYFDSHFVKPLYRGLAALFKNVGHRHDSGGFAVEGHEHRRLALGHEPFGGVLKFGESDATLVHQSAVSGQNGRAAYRRLYAHSDNGGKIIRVDSVCPCSASAI

SEQ ID NO: 107581 - protein, 322 aa, Unknown
  Obtained from environmental sample
  SIGNAL (1)...(67)
  misc_feature (1)..(322): Xaa is any amino acid
MWFXFCVLGFGGFLLGFXXVGVFFLVGVFGVLGLGGLFVFGVVFLFXXFXGFGFWGWXGXWGVLVLXGGFFGGFLLGWXXVWGCFGXFXXLGGGWLVCXXXVXGWVLXLXLXXXXFGFWXCFXWVVWXFVWXXLXVWVFXFGCGVFFVXXVXGCXXWFXWFGLGWGWXCFVVGXGXGXXXGXXFCFGXCFFGVXXXXVVGFCXXXXGVXXXGGXXXGXGGXGXXXGGVVGGGXGXXXXGXGXXGGXXGGGXGXGXGXXXXXXXXXXXXXXGGGARALPVNKTAERFLHTYWGRCGGIPRRGGSGEPKDRSGGEASPLRILYL

SEQ ID NO: 107582 - protein, 129 aa, Unknown
  Obtained from environmental sample
  misc_feature (1)..(129): Xaa is any amino acid
MGGWVERGVDCETAVVERLVAVFVGDVFADHLHEVRRHGRAVYLGIGGHRLVHDGFGGVFADELGGDHGLEHGVAAGGGALGVFGFVGPVVFGQLDGSGDHGALVEGEFVDIFAVVVFGGGLHSVDSGA

SEQ ID NO: 107583 - protein, 158 aa, Unknown
  Obtained from environmental sample
  misc_feature (1)..(158): Xaa is any amino acid
MNLFTARKRCSSSFHRSAAHEYCGYVESHRCHHHARSDLVAVRHADHGVGAVGVHHVLHAVGDKVAGGQRVEHPAVPHGDAVVDGDGVELGGEAALRLYNLLNMLADIVQVHVAGDELRERVDYGDDGLADLRIGHAVGAPKTAGSGHTAAFGHGRAT

SEQ ID NO: 107584 - protein, 115 aa, Unknown
  Obtained from environmental sample
  misc_feature (1)..(115): Xaa is any amino acid
MTGIEGAADFTVRPLSSAIARILPIAVPATTQLDTFSVPFLTSMVATGPLPLSSLLSTTVPIASLCGFAFSSITSASVSTFSHRCSTPAPVFADTRQTGTLSPHSFATYGAPTAG

SEQ ID NO: 107585 - protein, 131 aa, Unknown
  Obtained from environmental sample
  misc_feature (1)..(131): Xaa is any amino acid
MASSVPSSPSYFFNILFKSITSPSAISPTETLTPPAPKSLQRLIRRAAFGSRKSRCIFRSSGALPFCTSAPQVSSEDDVCDLEEPVAPPIPSRPVLPPKRITTSEGDGVIRTTFSEGAAPITAPSSMRLAA

SEQ ID NO: 107586 - protein, 105 aa, Unknown
  Obtained from environmental sample
  misc_feature (1)..(105): Xaa is any amino acid
MRAVNGGISFDIATGKVEASTVNGGIVAIQKNEGNVEASTVNGGIILTLSDPNGTLSASTVNGEVTLNTHGARDITKKQSVINATFGNGDAKIKLTTVNGSIVVQ

SEQ ID NO: 107587 - protein, 190 aa, Unknown
  Obtained from environmental sample
  misc_feature (1)..(190): Xaa is any amino acid
MLXXVIREHDLELALPAPALGGIRALGLQALQVLPGDIPGGVVARKAGGVEFGDARVLVLAGADQVGQVLVDQVIRADQLRHLLLGAARSDQLLRGRHVDPIDVGETHRRGGGGKVDLARAGLARQLHDLRRGGAAHDRVIHQQHVLAAELEIDRVQLAAHRALALLLAGHDEGAADVAVLGEAFAVLDP

SEQ ID NO: 107588 - protein, 111 aa, Unknown
  Obtained from environmental sample
  misc_feature (1)..(111): Xaa is any amino acid
MVNKTGKHGDTHGKNRKAFLEVFIMLFREDRGRGEKRGLLAAHDRLEAGAYRDLGLAVAHVAADKPVHGAGAFHIPLDLLYTAELILGLLKGKGRLEHGLPFGVFRVGIAR

SEQ ID NO: 107589 - protein, 185 aa, Unknown
  Obtained from environmental sample
  misc_feature (1)..(185): Xaa is any amino acid
MPALDAFFHASVHIVAQVIKTKLVICSVGNITGVIFLALGVVHIGKNRSHGYPKIGENRLHPFRVAACQIIIYRNDMDAVSGNGVKVRRGYRHKGFAFACFHLYDFPLMENKAAQNLHVKRALAEVALRRLARQRESFRQNAVEALAVMVTFAEKGGHFGEFFRRKGRRPLFFRVYRLHYGLHGF

SEQ ID NO: 107590 - protein, 136 aa, Unknown
  Obtained from environmental sample
  misc_feature (1)..(136): Xaa is any amino acid
MGQNDSPLGKTSKFSHFFIKFEPFLPLNSSQHPQRFKPNMKRFKMNIRRYKPNPRHSMPNPRRSMPNPRRSMLNPRRFKPNPRRFKPNPRRSMLNPRKFYPDPRRFQLNPRRFKINLRHLTFYPRCFSRTLDIVLG

SEQ ID NO: 107591 - protein, 246 aa, Unknown
  Obtained from environmental sample
  misc_feature (1)..(246): Xaa is any amino acid
MVLNSSNFRAEAAKNAAALFPARSLSISPIRELRRALVNEGLHAFGLVMPHSGHGEYGAFQLRGHIKRRIHAPVHQALAHSHGKRAETGNSAGNFHGFVHKPGSGHNTSDQTATQGFGGIHDFAKQQHFLGLGPAYQPGQPGCAAETAGCAQRDFGQAKAGCIRRDAQITGQHKFHAASQGIPIDRRDNRFGTALNGLAQAVSSTAEHIRIISIHGDFVINVRTGDKSLIAGSGEHNDPNLLVGQQ

SEQ ID NO: 107592 - protein, 166 aa, Unknown
  Obtained from environmental sample
  misc_feature (1)..(166): Xaa is any amino acid
MLGMELTEADIGIGEAVYLINKKPFVAYLKRGRIYRIDSFKFLVMGGALSIDQEYRIPGRSWWKEEYWSAREEAELFEILANDSDFDYVLTHTGPDSVNMRLFGGLFHGSAKFTDKVAALNDTVDSRIQCKGWFCGHWHRDLIYNDDEKKRFYQYLYRDVELLDQQ

SEQ ID NO: 107593 - protein, 144 aa, Unknown
  Obtained from environmental sample
  misc_feature (1)..(144): Xaa is any amino acid
MLSSTTSTLASGALNDILPLSTFGRAILLSSPSIIGTTTVKVAPAPYSLSALMVPPIISTKVLPMESPSPVPVISRFLTESARIKRANTFFRSSGLIPTPVSEISNVSLPSSAATLRLTCPRLVKLTALAQRFMSTWRSLTSSP

SEQ ID NO: 107594 - protein, 145 aa, Unknown
  Obtained from environmental sample
  misc_feature (1)..(145): Xaa is any amino acid
MSIVCGYWMGGAFLMAAKRFAEYRMIGDSSQAKLYRRSFGTYNEISLLLSTVFYGFLAVFFCGVFLIKYRIELLIFIPFLCGLFCYYLGLCFKLDSAAQKPEKLFREKGLMLYVGFLIALFVVLHYVNIPVFEMFLQSNLLRLPQ

SEQ ID NO: 107595 - protein, 113 aa, Unknown
  Obtained from environmental sample
  misc_feature (1)..(113): Xaa is any amino acid
MVISIAAGRGMRPAIKDMTQSLEYWGVSRIYKFGAAVFAASWDEITGKNKLKIERKIKSISKRILRTDAAKPGLKIKGLFYLFRALHKKSYLIPHDKEYWSKKGWLDTSRPWK

SEQ ID NO: 107596 - protein, 223 aa, Unknown
  Obtained from environmental sample
  misc_feature (1)..(223): Xaa is any amino acid
MHVSLLWAFVPELGYHLNRPSWALSVFFLCYALTPVFSKFLNRQNKKSIWLLFLGSWTILLLVVFSFNFKEMPDIFRGINFFSGMLLGKLFFCEAIPLPRKALLNDLLLLLAIILLFVNVYYLRQINARLSYNIAAPILYSALLLFLANDKGILVKILSVSWLRNLGKVSFYAYLLHCVLIDFLNLYLDKVTHWKSNPFDKPSATFMIIILFYGGCAIYSKLK

SEQ ID NO: 107597 - protein, 155 aa, Unknown
  Obtained from environmental sample
  misc_feature (1)..(155): Xaa is any amino acid
MLVTNLREGSAGEIQRLYRRRWKIEQKFHTLKNKMKFESVTGKASIYVQQDFWAQMLAFNIVQDLITAAQRRAARGAKKKKYIYEMRINENIAIGLFKEQFIRLMMTEDDQMKGALFKQLIADMEQYIVPVRKLKSSPRKWKRLNKYKCNQKPSF

SEQ ID NO: 107598 - protein, 117 aa, Unknown
  Obtained from environmental sample
  misc_feature (1)..(117): Xaa is any amino acid
MRHLHQLQRLYLLHRFYRKHRLYRLRLLLRLHRLRLLLRLHRLRLLLQLRRLRLLFRLRRRRLLLRLRRRRLMLRLRRRRLMLRLRRRRLMLRLRRRRLMLRLRRRRLMLRLRRRRT

SEQ ID NO: 107599 - protein, 160 aa, Unknown
  Obtained from environmental sample
  misc_feature (1)..(160): Xaa is any amino acid
MIEKSLFVQINLLFTHLKNEFAVFSQMLYNNSMNYLEMLPVSSIAKYSKGHPGDGIPFAGYPRANPSEKDKLILVNDPLGPEPVVLEFKLEDILYVEEIPSAVTKAGEGVPLVKIWIKRGSAGVIIEPFEVDEVNTPVKLAGRVQAIKERILQTGTQAAH

SEQ ID NO: 107600 - protein, 161 aa, Unknown
  Obtained from environmental sample
  misc_feature (1)..(161): Xaa is any amino acid
MGVELFQLVAGRAQDFAGVEFVRFFDQDFADKGGHCKAAVGIDVDLADGAFCRPAELVFGNAHGVGQLAAVLLYHMHIFNGYRGRTVQNDGEAGELLFNFFKDVKTKRGRDQYAVGVPCALLGFELGAAVACTDGYGKRVDLGLADKINYFAWLGIMAVLG

SEQ ID NO: 107601 - protein, 309 aa, Unknown
  Obtained from environmental sample
  misc_feature (1)..(309): Xaa is any amino acid
MECVENSIPVRIYENSFNNNFDYQDIKIGDKVSFLLQEKNGRFSGRDVINTVFEKSYLRINIRKSLYYPFIEIWKDGRSIKDTECPKEFANEVNKRIAYLDSQMNQTDMSQPLRNEFMFLLACTHRDTTEKCIKWITEQVEKQAIQNSRSIGFALGDVSEEWQRNILLKLKSLPTEKALRIFTYAIWHERHFIEKFTYNELDLILNVLKKTMLPIESCPTRREGQDKPAFIRWVRSTAEPLELLLGLLRTRESQDPEIRMILQPHRTITKELAEKVEKVAEICVQEGVNDLFSRVKLIGLNKLESFSAI

SEQ ID NO: 107602 - protein, 205 aa, Unknown
  Obtained from environmental sample
  misc_feature (1)..(205): Xaa is any amino acid
MSEAYAYIDEDSFTLEQTTAPGSSLPSSPSLSSPPSLSPLFTLSNILFPDFENVKTSIPYDSDALADTPTSATAPAFIVNDPSKASWAIARILEAEAGIAQRSALAESYKARIDQWLDSANKQDIDSISYLSFLLEPYVKDEVAKLYKSRTLSLPTGTASLRKLPDRLEITDSTTALAYCEAEHPEAVIIKKELNKSILKDLILK

SEQ ID NO: 107603 - protein, 174 aa, Unknown
  Obtained from environmental sample
  misc_feature (1)..(174): Xaa is any amino acid
MQKLRIFRYVRPGQGAGSAVCHKVPAVRRGDPNARAYSGAGGRASSRSAAAGPNPKRRLPRRQRQNRKDHIDPARRRVGSNRPADGAGHVRAAAAAGGFADRRAAARHGRPQGLRPPPIERVPTHDPQGRRDGGDIRLAGVLRRRSEGPDVADRAGAQPGAVRGVPRHRLRLRD

SEQ ID NO: 107604 - protein, 171 aa, Unknown
  Obtained from environmental sample
  misc_feature (1)..(171): Xaa is any amino acid
MNKILRNMYNKMLLCVTAKKPSGKKKIFSISQNTGKITKAGARFRQCLNEKSPVAFLQNSPVKHRHDASVAGAAHQAAKALFEFHNSLGQRKIHEGIAPSLFHRLAARLENRIVGSPEGQAAEYHKPQGVARRVYPFPKRIRGKQYRLGIVKEALQKPGTVVIALFEAANT

SEQ ID NO: 107605 - protein, 220 aa, Unknown
  Obtained from environmental sample
  misc_feature (1)..(220): Xaa is any amino acid
MGVATAAEYEAAIRKLFPQGEYWDRQFADPESDVSLFCRAKLPELVKFRRRMETLQNESFPETTEELVADWERVLLDSVYPKLSLVQRRLQLKSMWTIRLNRAELQKVADMFELTIADVYFPYRPGFFGFSRFGNSHIGSPAVFSVLFFAVRQENFREKSWALVNADYPAKKFGRMRFGMDRLAYFPVCQLRLYVYAKLRESAAGFAKCGRNRMFPRPQV

SEQ ID NO: 107606 - protein, 107 aa, Unknown
  Obtained from environmental sample
  misc_feature (1)..(107): Xaa is any amino acid
MNPVLALVYQRNCRCSSASEQERADWYAFGVFPFTCYDRALRSGNRKACVGVRYFFAFNGFVCFGRGFFLAFPVGDCFARRAVADLLPPDVAVFGQTAVGENRVFLD

SEQ ID NO: 107607 - protein, 186 aa, Unknown
  Obtained from environmental sample
  misc_feature (1)..(186): Xaa is any amino acid
MPVGIWSNTPIADLQLPPEEAAKMQSYIRKPVGTSQYDDYPGENDPAPWVPGKQSGGFKTDAMFLPVYIKHNVYLKGAKPCIKEPDPVVSRECGVEFVIDAANSKVTVKIAQPFQIHCPASEIITTELLGRNHHTEMLYEEKDGAPYVLDKDFTGTRRSAKPAAGPFEASGSAPVEIELGYHKKAL

SEQ ID NO: 107608 - protein, 223 aa, Unknown
  Obtained from environmental sample
  misc_feature (1)..(223): Xaa is any amino acid
MPGGREADDGIGRYDGAAVDDRGVVRDADAKPRQIILALGIHAGHFRRFAAQQRAAGKAAAGGDAGDHGFGAVCIQLAHGQIIKEKERSRAEHENVVHAHGHQIDAHGIVLVKCKGEFELRAHAVGGGHQHRVRHPGHIRPEQAAEAADIRVYAGDAGCGGKPLDAGHQRVAGVDVDPGIGIGFTACGRHEKLPAGAAVFGIWSGRMRLPRRQRSVDLFPSVR

SEQ ID NO: 107609 - protein, 132 aa, Unknown
  Obtained from environmental sample
  SIGNAL (1)...(65)
  misc_feature (1)..(132): Xaa is any amino acid
MVSDTNNAFAKRGAPLVSRKSLDISTMVLPRQFMRRRLSSLTLAMTTASRFSSAAAFINASASQAEQSTAILSWDSEIASSVPSNPKYFLGTASRFISMPLASSPTATETPPAPKSLQRLIKRLTSAFLKRR

SEQ ID NO: 107610 - protein, 211 aa, Unknown
  Obtained from environmental sample
  misc_feature (1)..(211): Xaa is any amino acid
MQGRQYATIWKNGEAKRLNNGDNDAYAWSVFVSGNDVYVAGAEIMEQSVAMLWKNGSPQPLGDGSKYAIATSVFVLGDDVYVAGQQVNPQHKSVAVLWKNGAMQPLNDGSYDALANSVFVSGTDVYVAGWEENEQGTYVATLWKNGVSQQLADGSSQSSAESVFVSGRNVYVAGMDHSQEKFVARLWKNGKLQPLNMEPGTGYAYSVFVGK

SEQ ID NO: 107611 - protein, 274 aa, Unknown
  Obtained from environmental sample
  misc_feature (1)..(274): Xaa is any amino acid
MSDHAGRDRRHGAGAGRVGGLFRRGSGIVPYFGMHSHGGGHGVRRQPHTQEEAIDRRPQRDSYRNTCRVQPPPRPALVDGGFGFGFRYRRGQDGFRRPRRQFHKPSFGGPRVFGGKLSGSNDKLPAHALRQRKRAGGQGGGCVRHALRRHIVGDVNIGINARRCGFLKERSRRRGGFLGGHGGLGGRQTRGGGIVGSGHSVGGGGVRGLGHRRRIVGHAALRDKARLRRERLQAGRFFAGSERPLLRQRRRLHRGNIRAGAAYRRDIFDIDTGG

SEQ ID NO: 107612 - protein, 233 aa, Unknown
  Obtained from environmental sample
  misc_feature (1)..(233): Xaa is any amino acid
MALPPEPPIIGANTFNNVNSYCCLFAMPESFEAYSTADYWKNFSCIQEEGTNCYLKWLSVSKGWMSPMFDTAITSYAVSLAYEDSTITVSAAPDDARATVTGTGERNLAVGVNPLDIVVTAKDGITTKTYTINVTRYALPIDPPDTITDTTTIITDTTTTGIINMPXRDVARHVSTNMDTKQRPAHKRIDHRRNLPHLYHFGNNGLSSRCNKRYRNVVQRGSTSRRLYHPFQN

SEQ ID NO: 107613 - protein, 207 aa, Unknown
  Obtained from environmental sample
  misc_feature (1)..(207): Xaa is any amino acid
MMTTISKCGVDFFLTGVRALSRAYYNHRISDDLDFFVNDDNDISEQIKEVYFKLKEDNFFWNSKVDFISNKNFTSFKVGWDKSDTLLKLDFVNDVASHFGDIDRTELFVRTDSIRNMLSNKLTALFRFAAKDVVDIREIALHEKVDWQQTINDARQKEAGLEIPIICDILQGMPQSELETIAWTKKPSWQEFRGDIDRIVHAMISGD

SEQ ID NO: 107614 - protein, 209 aa, Unknown
  Obtained from environmental sample
  misc_feature (1)..(209): Xaa is any amino acid
MSKSDFDDDAWDIPPXTCEKCGAEVPAGAKSCPSCGAPVQRGEKSLRCHKCGREAPVDANYCPYCAAPLTIGAELSSLYPPESARPITNKYAWALALLPLPAALLNLALAPMIQAGETPVGCALSIFLLGVQLVLLTADIKEMKHCLNAANINREIPDALWVLGGLLLMPAYLWRRANVSNRRYGPFIANLCIMLIGICMVVGGATAAQ

SEQ ID NO: 107615 - protein, 158 aa, Unknown
  Obtained from environmental sample
  DOMAIN (29)...(112): Predicted membrane-bound metal-dependent hydrolase (DUF457)
  misc_feature (1)..(158): Xaa is any amino acid
MMAESPSGRRSGRRRMVSTDAAFGAAMVWGAVAPDLIEHAVSRGDKTVFLRIHRGFLHWFGLYALALAAALVMPLQPRERALAAGAALGALSHLVMDSLTPSGVPLLPFRRKPRLSANMVATGSAGEYGLLAALAVLIGLACLRMDVSSWPARLARFL

SEQ ID NO: 107616 - protein, 178 aa, Unknown
  Obtained from environmental sample
  misc_feature (1)..(178): Xaa is any amino acid
MGQKSKADQHGLHEIIVTHWDGGKNTIVYVTDKVNEYLKQNGLKLTVSREAVRHAVRKYEDEIADVRKSIEISKSMAEVFKDHPGTEQSEAMLMFLAQLITKELHNVESITFEDPAEMINATAKLTLAQAKLSQYRTQAVKALNKAKEKIKAELQTAIKHDPDLLERLCKIVDNAKVA

SEQ ID NO: 107617 - protein, 133 aa, Unknown
  Obtained from environmental sample
  misc_feature (1)..(133): Xaa is any amino acid
MKIAVFGTFFHSSNGTHSAIAFECATICQNYFSGAFFCASKKAAEHNGVCTCCQGFNNITRIFYSSIANYANTLFHRFFGTFKNCRELRNSNASHNSGGANRAGSNSNFNNICAAFCKFPNSFGCCHISANER

SEQ ID NO: 107618 - protein, 380 aa, Unknown
  Obtained from environmental sample
  misc_feature (1)..(380): Xaa is any amino acid
MGYLDVLKKMVDLQPTGDSGLPAYAISLFKDWDGDLVMSVKCMGAFYGYDEFGFTLYHAETNTVHPVLDNDSLYIQGLRFFNKAYQMGILDPDSATQTFSDLTEKYSDGRVYWSIFSWLGPSNYNTSERLAQGKGMFAVAAEDQKNIVYGTSIFGKERIWSIGSKAKKPERIMELINWLCTPEGVMTNHWGPQGVTWDYDENNKAYLTPLGIEIQDGNKKAQMPTSAGGGQYVDGENKMNNTTFTINDINPVTGERYNKDFWSSELTRVTNPAKKAWQEAMGVRTEDEYLEKGNFKSLVVASDYVKPKRGDELEQKYVQVSNAIKNGSWRAIYAEXDVEFDRILRETINQAKAFGYDECVXWDQEQGKARAAAVRRALEH

SEQ ID NO: 107619 - protein, 136 aa, Unknown
  Obtained from environmental sample
  misc_feature (1)..(136): Xaa is any amino acid
MYLVLKRTEGMGYALPRVGQGVLEIVHGIDAPTVAGAVMGLAAYAVHYRIAHEQVGVGHVDFCPQGSCPVGKFAGAHTGEKIKIFFNGTVAVRAVFARRRFGYVVFILNRGSAVFAHFNIGKIVNISLPLFDDFYS

SEQ ID NO: 107620 - protein, 126 aa, Unknown
  Obtained from environmental sample
  misc_feature (1)..(126): Xaa is any amino acid
MDAGFVTQVFVHVVSADRKNNFLYAAKLGFVGIHYLEFPAFCFREAGIQAVHIRGEQGRFLSAGSCPYFHDYIFFIQWVFWDKEEFQLFLAVPQFCFQFLQLVFRKFPHLGVFFFLGNGLCVVNLF

SEQ ID NO: 107621 - protein, 482 aa, Unknown
  Obtained from environmental sample
  SIGNAL (1)...(23)
  misc_feature (1)..(482): Xaa is any amino acid
MSLKPSITPIFIFTVILSFPAKMYAQNAFPRIVPDSKALDYYHMGGQSGYSWQELAEISLWASGDASLSGMEKMKTTVTTLSTTIDPAASGKEKAEFILNYMHKNMLKSYSLYQTRLDTLLSNGRYNCVSSAVLYVILCKSAGIDTSGVMTKDHAFVMVHISGQDIDVETTNPYGFDPGNRKDFHDSSGKITGFVYVPPTNYRNRQTINQIELVSLILNNRVGDYERTNNYAGSVPLAVDRAALLLGDAPASEISTFESFFIGPRKDIMDRLLNYGASLLKSNKEEECIRWSVFASSTYPDINRWRELFLAAVNNRILRFIKERKISDAYNFLESQKAHITEADYAKLDMLIIDADLFNRANNFKTAAEGDEIIIGIEQAGRGGRLDKKRASELITFVIQKTAKSFCDAPLRDWRAAIRYLENAISKYGANRELEQSLRTYKGNLAADYHNRFAAEWNRKNFEEAERVLDEGLVEFPNDRQF

SEQ ID NO: 107622 - protein, 107 aa, Unknown
  Obtained from environmental sample
  misc_feature (1)..(107): Xaa is any amino acid
MDEGLVRVESLAARRTGNRTLRVTFVLYNTEQEPLVAGNATFDLVLPDGRILPMESQLDTSYRIRIMKTMAGNPVLPKDVAEDEKASVRLNILADGKLIYRTVTPLQ

SEQ ID NO: 107623 - protein, 155 aa, Unknown
  Obtained from environmental sample
  misc_feature (1)..(155): Xaa is any amino acid
MPPGHFVALAELALCGDKHLYHFVNAGAEIVPFCPFEPLYVNHRSLNTVRQPEGRITHFLGFLSEDRIKKXKFRRGLGLAFWRYLSYEYVAGADSRADADNAFLVQVVQTLLGCIRNLIGNFFRSQLGLPNFGYKFLYMDRGKHIFLDHALGDKD

SEQ ID NO: 107624 - protein, 181 aa, Unknown
  Obtained from environmental sample
  misc_feature (1)..(181): Xaa is any amino acid
MRIRCSFQIPELRRLFRGNPNGEGSAEVFDKHPEEALQAAQKGAVDHVGPFLLSVRVHKGHVKTFRFVKIKLNCGHLPFTAQGVFYFEIDLGAVKRAAPLVDFVAKSLGVNCPAQAFQGGVPAALFTDGLGGLGGQVRLDFLKAELFPYPKAETQNFADFVLHLLGCTEYVRVILGKTANP

SEQ ID NO: 107625 - protein, 178 aa, Unknown
  Obtained from environmental sample
  misc_feature (1)..(178): Xaa is any amino acid
MRRAVRFQRPNFHFAQTLSAELRFSAQRLLRNKRVRTGRARVHFVIDKMVKFKEVNYSAENRIYKRFTGSAVAQNCFACYGQSGFFKFFFYLIRRGRLEYGSGIPFVKSGARPAKFCFQKLTYVHTRGNAERGKANIQRGSVFHKRHVFFRQDTGDDALVSVAAGHFIAFAEFSLCGD

SEQ ID NO: 107626 - protein, 201 aa, Unknown
  Obtained from environmental sample
  misc_feature (1)..(201): Xaa is any amino acid
MAHAEEGVGKSHTRNSGGVCHFFTRNRICRAFVIRYWQPLKNHLKRLYREPIGEVGGHDRGVGFQGVSQRVNAGCAGKPLGRVHLYVRVNNRHIGHQLIIRQRVLHALGLVGDDGKRRYLAARSGGGWYCDKVRLFSHLGEGVDPLANVGEAHGHILKIRFRVFVEYPHNFARVHCRAAAKRDDNIGLESGYQRRASLGAA

SEQ ID NO: 107627 - protein, 129 aa, Unknown
  Obtained from environmental sample
  DOMAIN (60)...(87): 4Fe-4S binding domain
  misc_feature (1)..(129): Xaa is any amino acid
MRASPIIVHQERPMAQTKERQKPSLIQEYCKGCGRCISVCAKGCITFTKEINHLTGIAPVLLDLEKCNACGLCIDACPEPYGLLALEPDESFQLYGPAKLHGQDIDAPQPAKDXASPRVPLPKTRADGH

SEQ ID NO: 107628 - protein, 193 aa, Unknown
  Obtained from environmental sample
  SIGNAL (1)...(30)
  misc_feature (1)..(193): Xaa is any amino acid
MKFIHLSVGYALLGFACGTFGLLFNTIIGAQKNTEDVNNGFAHLNASYLAGVNVGIVSGSIVAQFFPYRTVFWLASGISLLFLAIIIFSIRSELVRHYFDVQFVKEKNDKKFALIKFIFKPVVLCTLLLALMPYIVTMSFTEYFMPVFGMENGLNEANIGQLMLISVCSHSFCAAFVIHEKKIPIRSMSSFLL

SEQ ID NO: 107629 - protein, 224 aa, Unknown
  Obtained from environmental sample
  misc_feature (1)..(224): Xaa is any amino acid
MFVEMLEYLIILATKRPKIKVGASIVISQLFVFFLIIGSQNPEFSHLSLIPIILFSFVFGELPGIFFATIVTMCFSPFGMDLNGDDSAFWVLRTFGYAAVAYATGVLGNSLIDFATYKEKVYFTDLFTQLPNRQALCKKLLQNSKSQNSGHFAIVIVTVSNSKTLTEIFGNKVLKSIFYQFKDRYSDIARRMSSKMETYSLGTNQISFFFEKNEEGNYGLKGKI

SEQ ID NO: 107630 - protein, 113 aa, Unknown
  Obtained from environmental sample
  misc_feature (1)..(113): Xaa is any amino acid
MENILIIGIDIGSTITKAVSIEDGKVTRKIKTKALDAVTAATGAFGKIVLENGIKISSVERIEITGAGASKIKDDIFGIPTGRVNEIEAIGIGGMFLSGMNNIIITNIGTGTV

SEQ ID NO: 107631 - protein, 112 aa, Unknown
  Obtained from environmental sample
  misc_feature (1)..(112): Xaa is any amino acid
MRGNYRRLQLLHGSGLVQKIDSLVGHTTARNITRRKTYRRFQGLGTVFYMVMVFVAFLKPLKNTEGFVRIRFFHKNRLKTPFQGRVFLKTFSEFRDRCGAYTLNFTPGEAGL

SEQ ID NO: 107632 - protein, 168 aa, Unknown
  Obtained from environmental sample
  misc_feature (1)..(168): Xaa is any amino acid
MDSKYRDPNNSDIGIAQPILEDYRKIMTNDYYSPKMEQGEEITFPVKLRWGSSEDSDGINIPIDFEGNPVFCEVMFTNPDDAEKLNAMMEINGKWFYKKPGVRSIDLSPAFFKNKLKGKQRLEFKLFAPPASGTNDPSQKEDWRINYYHILNAAPEFRIRYEPTMKNS

SEQ ID NO: 107633 - protein, 106 aa, Unknown
  Obtained from environmental sample
  misc_feature (1)..(106): Xaa is any amino acid
MRAAFNDLTIAYKHYLSAVAYCGKPVCDDKRSASLHQCLNSLLYKLFGSCVDTACGFVQNKNSRVGNEGARKSQKLPFSGGDAASALRDLRVVAVGQFFNKMVGSY

SEQ ID NO: 107634 - protein, 218 aa, Unknown
  Obtained from environmental sample
  misc_feature (1)..(218): Xaa is any amino acid
MRVNFAAKYGQFYHFLLPHISPEHINLERVFYGGMRAISPDQFLKWAVGFLIHDVGKASAVEYHEGVSSYDRSIVIDHVKKGYNYAITKTNYPKEASLIIGYHHEYYGDPDGYGFFRAYFARYKKENPTAKQDYCIGYDLEPVMDFEVLAYFPAKVLEIIDVFDSLTDPHRAYRHPMSPKEAIELMREEFINKRHKLDMVLFDLFVMFINEKEKEEAS

SEQ ID NO: 107635 - protein, 139 aa, Unknown
  Obtained from environmental sample
  misc_feature (1)..(139): Xaa is any amino acid
MALRRHLFNQHSLRVRRYRGLGIHGYGAVALLREGLRHYHGYDADRAIRHESPDSQEALHTGRRNLQSQRFGRQFGGIGGAGGGRQRPFGACGLLLPRHRQDRKTGLLRGKLPGRQKPPQQTLSDHERPHNMLSRERGR

SEQ ID NO: 107636 - protein, 187 aa, Unknown
  Obtained from environmental sample
  misc_feature (1)..(187): Xaa is any amino acid
MWSPLGSSADNLPYQRRRLGLRGFKIVVHDLVFVLALGAGDRHLGVGFIETQPYRRLVVGAARPKPLFKRLHGRRDDKYPHSLRVRGVELLLSENVYIHDDVPTGGYHGVYESARRAVVVAEHLLPLGELVPGRLGLELLNGHKEVVHPVYFAGARFARGGRDGVHDIRHGLRDVAQNRGLARARGR

SEQ ID NO: 107637 - protein, 139 aa, Unknown
  Obtained from environmental sample
  misc_feature (1)..(139): Xaa is any amino acid
MLHSMRGRDSGRAQRRQDGRGHRPADARRLCRDQRRRRGQVHHRLRTRLGHRHRRDRHAAAGERGAHIYKEYTDATLRQGCRRRYAYPIRRQYEAGQREGPSCPKRRRRRAHRRGGAQSGRLCGDCSAQMRASINKNKE

SEQ ID NO: 107638 - protein, 317 aa, Unknown
  Obtained from environmental sample
  misc_feature (1)..(317): Xaa is any amino acid
MDIFLKEIYSPIREILSPDRMEKLSHFFSSQKKSIVPSPHDFIESFREPVKNFEAAAKKYLGGADGKFEPWGKSGLKSGGLKSGGKTKRKVNSSKDVYSEWPLFFESLLALTKSRTGKENKFARGLKKKITGQPSLLLMALGYKTLSLLRLIVGDNSGKAAASLALHWQLDRILAECWEGAGVPSAEAHRAAEIAVALLARTGSSIPESYRTAKPPSAVAAALILENYDEGDFRKILAVNRFDNVTWFNKEAFEEALFLVSFFLYLETPETYGKESESSAARQERAEAIAEAVEALSKAKEASAYKLEELLGALAGK

SEQ ID NO: 107639 - protein, 110 aa, Unknown
  Obtained from environmental sample
  misc_feature (1)..(110): Xaa is any amino acid
MALAGATVAVRVAVSPTVRVRVVWSSVTPVTNTGAPDCATVTLHVAVKLPSIVVTVISAVPIPTAVTAPLVTVAAAGLLVIHVTALFAALDGVIIAVRIYVDSIFKVIAV

SEQ ID NO: 107640 - protein, 202 aa, Unknown
  Obtained from environmental sample
  misc_feature (1)..(202): Xaa is any amino acid
MVMGVIETLDVLAGSLKTPSGLAAIGGMATEIIRGRIHSGKGFAPLSPATASYRGQGRPLQDTGALRDSITFEVVDGQTVSVGTNKPYAAIQNNGGVINAKKNWLWIPAAGTRQLQRRYGYGPTDVLNGLKAAGYSVFRIGRTVVWREKRKTRNEEGKLVYKTHVLYYLKKSVEIPARRFFYLTDKDMDLLMKELGSALEQL

SEQ ID NO: 107641 - protein, 288 aa, Unknown
  Obtained from environmental sample
  misc_feature (1)..(288): Xaa is any amino acid
MVVFVVSPGPEAAVRLDSNGVVGGSRHNRPVLHRAHLHGSVPIRGVAEAEPTIIVVTPSPEASVALKGNRVLVTSRHGRPVLHSAHLHRRVPIRGVALTELTIIVVPPSPEAAVRLDGEGVVAARRNCRPVVGSVHAPRCRFVRTIASGTGIAELTVIVVTPRPEAAVGLDGQCMIVTRRHGHPVTVCPYADGGIPVCGVTQTELTATIVPPRPEAAVCLERNAMIVLRRHCHPATSAIAHLDGPVLAFICCPITELAFTIVTPCPETAVFLDGNRMIVTRSNCRESR

SEQ ID NO: 107642 - protein, 161 aa, Unknown
  Obtained from environmental sample
  DOMAIN (22)...(157): CheW-like domain
  misc_feature (1)..(161): Xaa is any amino acid
MSEYTGVEEQAEESAETTNSEKFLVFSIMDKSYCFPSGLIGEIALFDAVYPLPLMPSYVLGIVNRYSTPYALFDTGLLLQKTPCPRKKVLILKEEIDRVAFLIDDITAIADIKKDEISTVEKKSDSNEFADEINASFKWNDNDVFVLDVNKIINRVSEELI

SEQ ID NO: 107643 - protein, 256 aa, Unknown
  Obtained from environmental sample
  SIGNAL (1)...(20)
  misc_feature (1)..(256): Xaa is any amino acid
MTALSGISALTAFFFARALARDLCRDRLFFRTALVRNLYFNLSLLRAGFARCFCSVPLVDLFLRINFIRSSGDRVAAVAVAAVVGRGLAEVFEDEPPQALLRRAVRNHFSHTFTAALFQPPLRFPVERSILFVVFNHPLANPRVSTAIEQYAVRRFAVAPGPTRLLIITLYILGHIDVHHKRYVGLVYPHAESVCRDHYLHAVVQKIILIVVPLLIGQTGVVTRDAVSVGSQTLAHNLHVFARTAVNDSAALLFVF

SEQ ID NO: 107644 - protein, 238 aa, Unknown
  Obtained from environmental sample
  misc_feature (1)..(238): Xaa is any amino acid
MVGNTVINNSFPRDCSFLFAVKRRSVVFVINNKKFRVVRLENFFCLSFINLFKLFHLIFSCIFLSFSITCSVMSFFIFISFSVNALSSSDKIWAARIPALSAPSIATVATGIPDGICTVENNASRPSRAEDFTGIPITGSVVCAATTPARCAAFPAAAIITPNPFFRALKAKSDASAGVRCALITCASKGMLKSLSRLKSGSNTGKSLSLPIKTATFFIPLSLKFTRPNISFLAIYDN

SEQ ID NO: 107645 - protein, 143 aa, Unknown
  Obtained from environmental sample
  SIGNAL (1)...(30)
  misc_feature (1)..(143): Xaa is any amino acid
MQWFSNANGTTAATTPTGITASVSNVSNNAATVTMTSAKAVKEGTYYFKLTIDGVTSATVTLTVSSVTSSGELVPVNPLRAWMRNGLLHVEGVTMGETVSIYSATGQLVYQSIATSEEADIPLREEGVYIVRAGENSVKIIRN

SEQ ID NO: 107646 - protein, 186 aa, Unknown
  Obtained from environmental sample
  misc_feature (1)..(186): Xaa is any amino acid
MIASNARHDDGDPAVAHVAHQLHAGLRFGRGQAGQHFVQQQHPRLDGQGAGHFQATFLGRSERMGRCIDTGTEATKLDHLNGARHGSAGSRNAGERADHHILQHRHGIEAADDLEGATDAGARTGNRPKARDQPALQQDFPRVGRLGAGDAREQSALAGAVRSDQAEDFAACDIERNIDVGSDTAK

SEQ ID NO: 107647 - protein, 278 aa, Unknown
  Obtained from environmental sample
  misc_feature (1)..(278): Xaa is any amino acid
MRQRCFICTRLLQEVVQKSFGEDSIWLAHCLDLICNVVDWMDRDGQKLKNAFELESPHAIQIADRSYEVFANNYEKLKDIVQIYFYNGVADAGLLFMDAGLSYIEKCIKILERICVEEKSIESKNNLLFSYMNKGYILYYSLEYQKAVVIYDKCIQFGEQLKKDNELDDECILAKAFRGRGSAYECMKSHTQALIDMNKSIDMYERLYVDGLLSDENEMAVAYMNRAVIYESMAKYDESLLDAKXANDILEKLTNEGKTFNENTLAKVKSQIAITNSK

SEQ ID NO: 107648 - protein, 167 aa, Unknown
  Obtained from environmental sample
  misc_feature (1)..(167): Xaa is any amino acid
MGRRGAGAHRTVVGPPETVLQRDRPRRDVAYHLRHHKRRKTRHAARRRKLEKLLLQCVNPPYPRGEDHGLAEGVAGARLKPGVAERLSGGGGCVLRVQVHPPRLLRVKIGGGIKPLNLAGETGLEMRAVKPRNRRRRRDAGQERRPRAGDAVAHWGDRTEAGYDGPL

SEQ ID NO: 107649 - protein, 187 aa, Unknown
  Obtained from environmental sample
  misc_feature (1)..(187): Xaa is any amino acid
MIFIANPYSFIPCPKESKFAFTTVNLLFNFKVIVKISIRKRLIAGMFRNFVFYIRIFISSWRKCLEPVPDGIKRPIITFSFKPSSLSFEPDMVALVSTFVVSWKEAAAMKLSIARAAFVIPRSNGAKWAICLPSSCKRTFSKRSSILETSSPVRNLESPGSVITTFLIICRTMHSMCLSEMVTACKR

SEQ ID NO: 107650 - protein, 139 aa, Unknown
  Obtained from environmental sample
  misc_feature (1)..(139): Xaa is any amino acid
MELVKFIEHFPNKAGGGVVHTVFQIIIKQNRVALFVDKFTLLVQHVVVIQKMFANLEVSFLDFFLGVLYALVQPGMVNRLAAFHSYSGHDALHLFAAEQPHQFIVHGDEEFAPAGIPLPGPNGREAGCRCGGSRGVPCR

SEQ ID NO: 107651 - protein, 177 aa, Unknown
  Obtained from environmental sample
  misc_feature (1)..(177): Xaa is any amino acid
MHXXXXXXXXXTLEDWVFILAGDTAEALDCEYYHSAGYGETVFIGVGADPEVCGWMYGYLYKTLLRLASTHMRTVCKRLRSNASKKQSRDSFLLGAVAVIHRRLKEQKAALPVTPDALVVAKQEIIAAAKPKDIERTKMTIGYIRGNDWNAGAAAAHSVTLSTPIKGGAPQERLALA

SEQ ID NO: 107652 - protein, 295 aa, Unknown
  Obtained from environmental sample
  misc_feature (1)..(295): Xaa is any amino acid
MENFETNDEENASQFWQRGISNRQSYPLKLAMPIYRKLEKYIEANKCEAVALLFDKNYIQAGIKYADSGFRNEAIKAFWLANSIEGYENIVQKAKQNLDYKFMYSIALAMIKNEKNILVDAIKIVSETSKDTLLSHILKGDEIFPVLDLHNILPYAVNEVVQKIRAHIDPSTDELLLHQIMEISRRGIKITPSYIAEIAYTLHEYEKAIEYWDKSETKDNEKYITAKIFTVKFPENLPLLKSIKRYDEITNQYSVNKNKKLSEEHLCIAAEAFLYQKDPENALQICETPYQSGQY

SEQ ID NO: 107653 - protein, 174 aa, Unknown
  Obtained from environmental sample
  misc_feature (1)..(174): Xaa is any amino acid
MQFFLRVRVRHQQLQQKAIQLRFRKGICPLMLNRVLSCQDKKRRWQRIGLFPYRYLLFFHGFKKSGLNFCRRTVNFVSEDYVCEYRPPAHRKRRGRLFPHQRPGKVSRQQVRGKLNALKNQSGNFRQSLNSPGFCKAGNSLKQYMPAGDKGCKKAIDHFFLTYNALGHFITSGI

SEQ ID NO: 107654 - protein, 209 aa, Unknown
  Obtained from environmental sample
  misc_feature (1)..(209): Xaa is any amino acid
MKGGFVYIMSILFSGDFHANAVHELGVISKKSLVRRHGKDKFTNIRYHIILGDGGFMWPDNQGTDKYNYKALSFRPFPVLCVMGNHEPIYGMMEKIPETDIGIGETVYKIHDDPLVAYLKRGKAYTIDGSKFLVLGGALSVDRMDRVPDKSWWKGEYWTEEEKWDLFNLLRTDKAFDCVVSHTGPHHINRKLFSPENFDPDKFADEVAF

SEQ ID NO: 107655 - protein, 99 aa, Unknown
  Obtained from environmental sample
  misc_feature (1)..(99): Xaa is any amino acid
MREGWIMGKEKESYFVCPNCGAELPTSARACPNCGSDENTGWSENTYLDGIDLPFDDDDYEEVKKREFGGGKGGARVNWMAVVGVAVLAAMLMAFVLHC

SEQ ID NO: 107656 - protein, 134 aa, Unknown
  Obtained from environmental sample
  misc_feature (1)..(134): Xaa is any amino acid
MRSRTRAEGAIAHVQGDFSPGKAAIQQTLAHGRGEVQPGGGRGHAAGFVHAGVYGLISMAVAFAGFAPHIGRQGQMTMAFHQALQIACPLQAQAAVSECAFFQNSRGKSAVQHEAETRPGRPGRVEQSVNLGRA

SEQ ID NO: 107657 - protein, 141 aa, Unknown
  Obtained from environmental sample
  misc_feature (1)..(141): Xaa is any amino acid
MHGRIDIFSNQFFGDNNGVLKVVAPPRHESHHHVPTQRELALACCVTVGQHRSCINLLPLPHAYLLVDGGILVGTFELCQLVGIKLRKPQNIACVTAGLTYYNLSRVHLFDDAGVLRYDHAPGVESGAPLKPGTHKRRLRP

SEQ ID NO: 107658 - protein, 137 aa, Unknown
  Obtained from environmental sample
  misc_feature (1)..(137): Xaa is any amino acid
MGDNEAGAAFHQQIHGFLDEPFGAGINAACRFVKDEHPGIRENHARNGEKLFLPGGNIIAFLVQNHAVAARKGSHKVVYLRGFSGIFRFGVGCLCPAVAYVISNCSREKPCVLQYHSEERTEILPLKGADVVPANRN

SEQ ID NO: 107659 - protein, 241 aa, Unknown
  Obtained from environmental sample
  misc_feature (1)..(241): Xaa is any amino acid
METIPEAMAEIRRRCNNNGEIDNSRIPDFKGIMIGDYLDLPSLNDGTTNFVWNADYKNLRMLVSGFNIYKGAADTENTDNHILFSFRNCVTTRQMNTTDSNTGGYAATAMKTYLDGVFATGLRTALGGDYLYPVYRLLSVSDSAAWAWNLNTVFLPTECEVWGAPIWGSAEKHEGGFQCQWPIFRETVYKGKKHNGSRMWWWEASRRPSTAYFCYVSHAIDADTGHASSALGGVAPGFCVR

SEQ ID NO: 107660 - protein, 270 aa, Unknown
  Obtained from environmental sample
  misc_feature (1)..(270): Xaa is any amino acid
MFLNDFGDLVSPAISFFPENKVEDAEDISILRMCVRHNQDSNTGFVFINNHQRNRNMAGHSEVTLSVALHNETIHFPPMNIPKGFYGVFPYNIQLGDAFLQSTNAQLLCKLKDKFVFFCHEKPVFNYSGDPAPAIVLTEEEADNTWLFGDELYITRGSLIEKEGELFLSTCKTEETVMRYPDKKTVSFRFNPVSINSSFNETYRDDTFAEYELRCDKIDADSVNDLFLQIDYTGDRAELYRDGKLAADWFTTGLPWRVGLRRFIMRDASH

SEQ ID NO: 107661 - protein, 116 aa, Unknown
  Obtained from environmental sample
  misc_feature (1)..(116): Xaa is any amino acid
MVNTAAVAAARLVVTKILPADTTSSWLVIATVEPPLKPNQQNQRMKTPRAPSVKLWPGIARDSPVLEYLPIRGPTIAAPTNDATPPTMCTAVEPAKSWKPRSESQPPPHIQWPEIG

SEQ ID NO: 107662 - protein, 140 aa, Unknown
  Obtained from environmental sample
  misc_feature (1)..(140): Xaa is any amino acid
MNNRDIAILEKLLEIQNCIFNFQINFNILKNKLLDKFVSICKNNRNRLFLELGLQTIHKEEMEILKRNNDIEHIKYILQIFNNQNINYEISIIFGIPGQTFETFQNTIRFLEENGCKKYTAYPLRLPQNSIMKKEASKLK

SEQ ID NO: 107663 - protein, 186 aa, Unknown
  Obtained from environmental sample
  SIGNAL (1)...(39)
  misc_feature (1)..(186): Xaa is any amino acid
MIITLLLGEYTMRRKFTKLAQMATLGLALVFTFSCTSGGDDNGGESSSSISNGYVSSSSVAGGGNGGSSSSVTGVGGSSSGDSGNGCESGSLPNGGYASKGNDIANYRTVQIGEQWWMAENLNYAVEGSRCYGECGKVVHNLDIDELITLSSAEIQANCDKYGRLYDWTTAMALPSNAIELFPQTM

SEQ ID NO: 107664 - protein, 145 aa, Unknown
  Obtained from environmental sample
  misc_feature (1)..(145): Xaa is any amino acid
MIVDFEVSSSLSLSVYESIAQRLKDRFNIKYLCIDANYAYEKIKIAEKHFIGKSETCFVESMNAKIRRKLARFNRKTCRYSKSLDVVIASLILLFNRPLRKIIFFSVQCYNNLTELWKNEFIRKSGKTKRGRFQANNRSKASDIL

SEQ ID NO: 107665 - protein, 120 aa, Unknown
  Obtained from environmental sample
  misc_feature (1)..(120): Xaa is any amino acid
MNQGDASAGYNAFVYRGAGGPHGVFHAVLFLFKLNLGGLAYIDNRYAAGEFREPFLEFFLVIAACPVFYLDFDLGDAFLDILDFSTPVNDCAIVLAHFNVLGLCQCVKSLCFPSLSNSLP

SEQ ID NO: 107666 - protein, 209 aa, Unknown
  Obtained from environmental sample
  DOMAIN (15)...(199): ATP synthase (E/31 kDa) subunit
  misc_feature (1)..(209): Xaa is any amino acid
MKLEKKLESFSRYVMNEAEAQRRNAAREMDAAFGAAVDEAARAAAKHADEFVRSERYRIDKTKNKNITAASAQAKRSLIGLREQLTDELFERVRADVADFAESGAYEDYLISAIGAASREADGFFGYAQVSEKDMRLAGRIEAETGLMAEAAGDIVLGGFKLVSRDRRAVSDDTLDARLIQERLGFSVLASQDMANMAYPNGGAAGEAV

SEQ ID NO: 107667 - protein, 113 aa, Unknown
  Obtained from environmental sample
  misc_feature (1)..(113): Xaa is any amino acid
MNINKGHNPKLEQRSKNLAGYSTFVAKVREFQFNSNPLKEAIEKAVVYCINKGILRDYLKQNSSEVVNMLSTKFKLKDALAVAGEEGEVRGIKKLLALWEKGIPLTEAKAWDF

SEQ ID NO: 107668 - protein, 342 aa, Unknown
  Obtained from environmental sample
  misc_feature (1)..(342): Xaa is any amino acid
MNDKQTMTAYKLRLSPAKCALDLSDGSERGEYVNQDYILNVLDKPHRGINLMYCYYPLDKGWPARASTLAEPGRAGFAWNYAYDDYFPYQGGIGAAGDSTGKEPFASMRDVRRHGQDVILTLTIDCAVSDEHLVQIAKDLIPFGRLMLRINHEAAGTWFAFNKRYTYQQVADFYVRFHKIVKQHAPHIRTILCIGAALKTKSGKLEYEDEFAGAIAEADMWSSDTYLSLHWDWPFDIAEPGGKSHKRSTNNDILEGLRFDFERFAARAGKRKPFVLSEINADGDVNGPYEQAEQLADFYRRIPKEVPDVSGITYYQFRDRGRLGLEIEDPNNSSXGYRSAFS

SEQ ID NO: 107669 - protein, 182 aa, Unknown
  Obtained from environmental sample
  misc_feature (1)..(182): Xaa is any amino acid
MTSLVVVQVLKSEDGTEQFLYKTYTESAIAKKVTDDAVGHSEVQEILSKVKIGETYKAHNGDISTYGIKELLSFQSLGFILVLCVLAGLWAVISLVSYVVKTLGFAEEAKPSQPKTAAAVSASGAKTIHPGMSDEQFIAIISAAAAHAFGGAQVSVVKFKPLNTMDWTWAIQGRVALHTHKV

SEQ ID NO: 107670 - protein, 120 aa, Unknown
  Obtained from environmental sample
  misc_feature (1)..(120): Xaa is any amino acid
MNPARRAPPCWGRGGNLSSNRPPCKARSARRFSATRRACPCCGGSRSPRRRRGCRRRSAGGRKAGARGRSSPSARYVHISAPIRARTATPRNRRGRPRCRCNARRERRQSCAPSRPHPHT

SEQ ID NO: 107671 - protein, 104 aa, Unknown
  Obtained from environmental sample
  misc_feature (1)..(104): Xaa is any amino acid
MDSNSGGNVRYAHSGIGGVNALASRAAGAHYVYAQIFGFYVYFCFIRLGQNGHRYRRSVNSSRRFRSGDPLHPMDSRFIAHVFVYVVSGYGKYNFLNAAQLCVV

SEQ ID NO: 107672 - protein, 126 aa, Unknown
  Obtained from environmental sample
  SIGNAL (1)...(34)
  misc_feature (1)..(126): Xaa is any amino acid
MEYINWSEKKIPVTGSYDLFIAGGGCAGAGAAIAAGRSGIKTFAAERMFSLGGTMTNALMSKIAISSCNHGIAEELINAWMPIKNQISLPRVMRFRLILNYASGCWIEWLLMKPEQKFGLGQRSAM

SEQ ID NO: 107673 - protein, 244 aa, Unknown
  Obtained from environmental sample
  misc_feature (1)..(244): Xaa is any amino acid
MSIFDSLGGTNKFKRGMEAASKAYEAKFEQHAEALKRLERNFGDGWKQTKDVADAILSQVEDNEKARLYGLYSQIDIKGLEQKYKEFIVAVLYTLSPETSNELQQSYIRSVQKYLGIDTPQTNIEFSALENIDNLTAQKAIFQVCVEYLFLASNNLDFFEQYEESLFNYFSLNEKAMLGIWENVLQIYTATGPLGLAEKYGFVPKPSEGKGDVGAPAPVELEDEIIESDIHIPALKGENSRRKI

SEQ ID NO: 107674 - protein, 109 aa, Unknown
  Obtained from environmental sample
  DOMAIN (4)...(98): Plasmid stabilisation system protein
  misc_feature (1)..(109): Xaa is any amino acid
MDNLIISKLYKEDTLSTYNYIKNVLNAPIAAKNLINEVKEKLIYISKNPTHRPLVYDKYLASLGYRLISVKNYLIFYIINDDNIHIKIVRFLYCKRDWINILKEKTVKK

SEQ ID NO: 107675 - protein, 239 aa, Unknown
  Obtained from environmental sample
  misc_feature (1)..(239): Xaa is any amino acid
MSFGSGPMVFAAPDLVMGVRALSPSPNAPPQETSFTSIASRPLLEIFSAAFSKRFSLSAANPNIQRLPLVLPSSRRMSGVLTNVSVSGALPFLAFCGLHCSGRWSATAAAAHTPSMLGHSERQASSMSEALRTRVVETPQGAGSSPPSTKLTFAPASLNALAISIPMRPVDLLVSVRTGSRSSRVGPAVTSTRLPVSAANGFPPKDTMASKMSSTSASLPSPSSPQAKRPDPGWTTAWP

SEQ ID NO: 107676 - protein, 162 aa, Unknown
  Obtained from environmental sample
  misc_feature (1)..(162): Xaa is any amino acid
MPDGGFLCLHRLDKMKRIPKSCVKANMHALMXCAECRKKGIKTDIEELLLDYFWNHNLFYRTANPDALILNAREGWRTIDTFYPFEVMRVGLQNIVESLCTLGYGNDPRLNEAWDILNNKKTPDGKYILNGTLSKSYLPKERVGKPSKWVTFYAILARKEII

SEQ ID NO: 107677 - protein, 141 aa, Unknown
  Obtained from environmental sample
  misc_feature (1)..(141): Xaa is any amino acid
MRVKGSYSPPSHEIEVDGNNVTLRFYENVEEINEIDEVNGTAFVGYAFDRYTIKRPYDKALAGRVITNVAAWREMAKREEADGLAVKIRADRNRRLANTDHTQLSDAPGNSGAYRVYRQALRDVPQQQGFPYNVEWPVEPS

SEQ ID NO: 107678 - protein, 99 aa, Unknown
  Obtained from environmental sample
  misc_feature (1)..(99): Xaa is any amino acid
MEAAAAKSAKDAVKNTAKVAAAENILKAPEIAPVMGLAAHVVNAGKAELVIGGLFLFIGKHLVGFSGFLEFFFSFLVARILVRMILNGKFTICLFYIVF

SEQ ID NO: 107679 - protein, 129 aa, Unknown
  Obtained from environmental sample
  misc_feature (1)..(129): Xaa is any amino acid
MIQIRTLLQTRHHRLIKLKLPWRRNLLLKCRLLSHRHSRRRHSLKHNSNRSLRSHRLNRHRHRLSSNSNNNKHRHSRQIKDNRRQRRSQISLLSLHKHRHNQRLMKKQTHLKPLLPMMILKIKKSLPLP

SEQ ID NO: 107680 - protein, 184 aa, Unknown
  Obtained from environmental sample
  misc_feature (1)..(184): Xaa is any amino acid
MGLPGRRRTTVPPVRHGHAGRGSIRGGPRHTAGGPNGKDTAARSWARPSARRRTHDAQSCRPDPSRLPHFQHTRHHRAGGNRPCKWSNRGPAKRRQRHHAQPHPARLPRNVQHLSRQARLQCPQQSGRLVALARCLRYPQEDHRRRSRRHSGRDRVNRQKAVERGWVSAAVASGIRPVEARSRH

SEQ ID NO: 107681 - protein, 275 aa, Unknown
  Obtained from environmental sample
  misc_feature (1)..(275): Xaa is any amino acid
MVKPAQRSVNKPGFKEGVRLMNTWYNEKLIYQDFPLQTVAEDGNNILKSGVAGAFGGNWDLPYRTDYNINADLAKNVPGASFIAVDLYLKNKAMLDKVGLWMFIPIYSKSQKEALQYLNWLSKFENLNYLQIGERGRNHNLVDGVPQVVPVTGPWIQNSAQNIDITMPINGVWLSSSDAENAKVLALTYPGTPQATIVEAYQISVKDGRAPIVRPFVAKVTQYSQVITDKGDALIAQAIRCTPAQFEATWTSGYNDWLSSGAQEVINERTAAWPR

SEQ ID NO: 107682 - protein, 100 aa, Unknown
  Obtained from environmental sample
  misc_feature (1)..(100): Xaa is any amino acid
MLLNNPQYLCLRRKRHIANLVKKKRAAAGDFKAPFPAGDGVGKSSLFMAEKLAFQESVRYGGAVQAHKRALAAGRAEMNRPCHYFLPGSVLSGNKDTRVA

SEQ ID NO: 107683 - protein, 229 aa, Unknown
  Obtained from environmental sample
  misc_feature (1)..(229): Xaa is any amino acid
MLPGGQQIDKAFVSKVGVKPLDQFGNLSRDAPVAFAAVAASAQMTTERNQRRRGYVHAVRAQSERFYNIGAGTDAAADNDGHAVANSFVAQAFVNTGKGKFYGNADMVAYARRRGSRSAAKAIDGNNVGAASGNAACNRRNIMDGGNFDNDRLLIIGRLFQREDQLPQIFNRINVVVGRGRNRIAAFGDHSVREMSPTIFAPRRCPPIPGFAPWPILISTAAPEFKYWG

SEQ ID NO: 107684 - protein, 221 aa, Unknown
  Obtained from environmental sample
  DOMAIN (94)...(127): Tetratricopeptide repeat
  misc_feature (1)..(221): Xaa is any amino acid
MMTFAEYDARICNEDLKEYFHHLTLERQENPQNETIKDVIAELQGIVIPGRLSGKAVIELREKNKVAANLAEEGKIEESLAVIEQIIDACPENYSAFYTLGYISFEQDDFEKAIECFKQAFEYNQFFTDVVLRIYDCCVCLGDMSDIGVVLNKALALQPSDPELLETRRHLEDGTYPERLAQHIKKTDEKKDKLRQELLEIKRLLEEGNTEEALEKLNKLV

SEQ ID NO: 107685 - protein, 192 aa, Unknown
  Obtained from environmental sample
  misc_feature (1)..(192): Xaa is any amino acid
MIKQETITHKDLCIATAKRFNKKFALYEYKSTASDEEPDVLVFDMGGTVLFEIKVSLADFKKDQKKDARKKYKLDWHISFWHERYTSKEMRPEVSRQYCKIVREHPELVYVQNDHLGNRRYYVCPWGLIPVDMLPEGWGLLYYKNGKFFLKKESGKFRSNLRVENNLAIHALRRFASGDSTGILINTYGGDK

SEQ ID NO: 107686 - protein, 178 aa, Unknown
  Obtained from environmental sample
  misc_feature (1)..(178): Xaa is any amino acid
MTPPREKVRACLSNFINGPCYSWLYMKAMTNRPGWMIEPAGYGETRLGGMKAYCKMDFLXPVGEEVYILDWKTGAKDQAKHSAQLMGYAAAANSNFSIPWNMIFPKIVYLYPQYDELEIRFSESGLSDYFQTIREQTEAMYALCADVEQNVPLDISEFAKSPSPFQCKNCRFQELCGL

SEQ ID NO: 107687 - protein, 111 aa, Unknown
  Obtained from environmental sample
  misc_feature (1)..(111): Xaa is any amino acid
MRYELGHTKIRQRTCKIKRDIVSGVSFSEAFARTKCFSPYVLGWLSIADINGNLNEISGSIRDHYLQKENKLREAAAKLIEPAVIVLVGIYVLIIMATVILPILSYSGGIL

SEQ ID NO: 107688 - protein, 108 aa, Unknown
  Obtained from environmental sample
  misc_feature (1)..(108): Xaa is any amino acid
MLGSTDLTHYGSNYGFLPQGRGSPALRWVRDVNDAAFIKAVEAGDENEVLLRAQKDSSSCSVGAVLGAMGFAREEGAKNARLLEYATSADTELTGVPDFFVGYAAFAF

SEQ ID NO: 107689 - protein, 210 aa, Unknown
  Obtained from environmental sample
  misc_feature (1)..(210): Xaa is any amino acid
MFLLDKLQQLALAHYRVREVEPSELGLLRAVDAGKLQQEPVVQRAVILKLHCAERVRDPLYGVLKPVRPVVHGVDLPRGAGSVVRRVHDAVHHRVAHIHVRVRHVNLGSKHSRSLRKFSARHCGEEFQILFYGAVAVRAVPPRFRERAAIFADLVGAEIIDVGLARTYHLYGVLVRLAEVVGGVIQVLAPVEAEPPHVAYDGFYVLVLLF

SEQ ID NO: 107690 - protein, 285 aa, Unknown
  Obtained from environmental sample
  misc_feature (1)..(285): Xaa is any amino acid
MTDWPSCSIAEKLLQLLQGEIVPASSAKHAVIEEMITEGIIERKGRIHKTLSVSNTNSLLIYLQNKHSIKNLEKYILTLQQENISRGEATEVSGNSKLKTIRTFKGFLGNCYNPIEATINGRSIILNPIEGTFHFIYNFESFTIPQDIVVVGIENPENFRHIEKQKHLFETIKPFFVSRYPQNQSKDLLKWLQSIPNTYLHFGDFDFAGIGIYLNEYKKHLAEKARLFIPENIEYLIENYGNKDLYNNQKINFDTKSVNEIDLMRLIEIIHKYKKGLEQEILAID

SEQ ID NO: 107691 - protein, 119 aa, Unknown
  Obtained from environmental sample
  misc_feature (1)..(119): Xaa is any amino acid
MLRRDPVDSGLWRAPVGRRGAAACLRVVCAPQFYDIPAAVFNDLFAGDIVGVAQPHFASGSEPVEFLWRILHEVVAFYVYHPRKRHLAAPRRFVFGIIQSVELLYLPFRVVFYHNLYWI

SEQ ID NO: 107692 - protein, 186 aa, Unknown
  Obtained from environmental sample
  misc_feature (1)..(186): Xaa is any amino acid
MTEEYILKHKDKPVLLFDLNTTDYVPSGIKKLFDKERLPFILEDDKDTNRFIALLTLWIQHRGITESRDDYERVMEENHVSSGRELSINSLGLNLTDHYWMHNINQDLSWEKLNFFDHGFNKKNMERIYPSNENAPIILNPDFSVDGSLIKEWVTDGKDRVLLKEGEAGFKQEPYNEVIATNIMNL

SEQ ID NO: 107693 - protein, 168 aa, Unknown
  Obtained from environmental sample
  SIGNAL (1)...(45)
  misc_feature (1)..(168): Xaa is any amino acid
MIPLYKLEKLPRTQKLRKIAKIFTMAETRLSSLLASGLSASSLTAGKSADVFNSQETAFFADAAKMLAEDGLFPADAKKAIIESKEIFQAAITAPIGDLPIFLRALNNVKHILLAETGKDQADWDFTCSDGRLDPHKRQIFKGMLVYMEDIRSPFNGGGMFRTAESFA

SEQ ID NO: 107694 - protein, 125 aa, Unknown
  Obtained from environmental sample
  misc_feature (1)..(125): Xaa is any amino acid
MTRQIREQIEDIQSASSSLIIYSEEGSDRIAEGHKLIKDLEDIFKDIRSSAEIASTQTQTITVSTESQVKSSEQISMKISETSRMLRSSIGANRKAALSINSLTESIQELESFLKKDNRAGEPWQ

SEQ ID NO: 107695 - protein, 139 aa, Unknown
  Obtained from environmental sample
  misc_feature (1)..(139): Xaa is any amino acid
MHRLAVLNQYVVGDVNHVVDGAQAGERQAPFHPLRRRPYGHVPHQSSHIARATLRSLHLNGYRRRYGVVVTRLRLLSRLSERQAEAGAHLPRHAHDAKAVAAVRGNLYLNNGVVGDVLGKRRAYGVVVRQRNDSGVVVR

SEQ ID NO: 107696 - protein, 121 aa, Unknown
  Obtained from environmental sample
  DOMAIN (52)...(109): Bacterial regulatory proteins, luxR family
  misc_feature (1)..(121): Xaa is any amino acid
MIRSFLLHSVFEISYFSSLFWAAXTLSYQIPGCXYCKKRLFSKGTYFGKTGISSLTKRENEVALAICNGLKYEEIAEKLCVSLSAVKKHSYTIYQKLNINNNRELMQIFMESEKNDMNSKK

SEQ ID NO: 107697 - protein, 190 aa, Unknown
  Obtained from environmental sample
  misc_feature (1)..(190): Xaa is any amino acid
MARXKTLHLSILRLGDKTAGGDRETIRGYERRRDSLHGGRSAPDVDRPLLHFRQTAHSHLLRRPWHDGLRSARGDGRGSGTSRQDGGQHRRRRVYTDEHTGAGHHRDQQDPGQAGDTEQQLSGDGASVARLVLQQALQFDLPAQGPRLSRLPRSQRMRQAIRARFRRVGAELRHSRIPRREARRGGGRAA

SEQ ID NO: 107698 - protein, 146 aa, Unknown
  Obtained from environmental sample
  SIGNAL (1)...(33)
  misc_feature (1)..(146): Xaa is any amino acid
MIFFFFFKKKKKKTRGGGGVFFLTGGCFFFIFGRPAGVFFFPPKKNIFFFFFLRGNQKKSGASSFFWGGGGAPLNKKRGFFFFFLKNLPKKGGGEFFFLPPPLRGIGSFWGNRGGGFFKKFGGGVFPRKKPPWGFFFPPKRGGGKN

SEQ ID NO: 107699 - protein, 168 aa, Unknown
  Obtained from environmental sample
  misc_feature (1)..(168): Xaa is any amino acid
MLKERGGGVADKSWPSKKDMSLSARPPNKLFSIHFCRSLYAKLGFTSAFRLKTSTYSRAYNLHRFHQYHYDNNRADCYVCPETVIAVAYGEVAEAPAAYGPGHGRIAYKIDDGQGEAGNQRWHGFRDQHLVDDLKICRAHRPRGGKHALVNLGQGGFGYARDKGRGGY

SEQ ID NO: 107700 - protein, 185 aa, Unknown
  Obtained from environmental sample
  misc_feature (1)..(185): Xaa is any amino acid
MAAFYPLYGVHAGRRPRAVYVHLVAAGHPRRPLYXRGEHHALRAEGLCPFRYDLRIPHRHRVHADLLGARLERLVHIVQALEPAAHGKRYEHAPRDLLHALDIDTALLGAGRDVIKYQFVNLLLIHGPRQFYRRSDADVILKPHRLSHHAVDNVEAGYQPFCQHDIPLRKNPPNSASPASPLFSA

SEQ ID NO: 107701 - protein, 193 aa, Unknown
  Obtained from environmental sample
  misc_feature (1)..(193): Xaa is any amino acid
MRGAKRRSNPEYLGIGTIFNCVIYKQKTTKTDINNENTQIQRHNNRRPLNVHRSRLRPPRRRIGSYQGGPRRRDVLSGAVDPRQHNRERPHSFKPAYSHLSRHRHRRILRETGRRRARRRREADRRHKRGGAPRIYRRIPSLVNSGRPDFRQNQHRRQHSGRGARRSCARRRARNHAFAKGRRLRKHERPGDA

SEQ ID NO: 107702 - protein, 176 aa, Unknown
  Obtained from environmental sample
  misc_feature (1)..(176): Xaa is any amino acid
MRGHREHIDFHGLDINRDVPHSLHSVGVEPNAATAGNFPDCLKRLNSAHFVICKHDRHKHSIRAQGFFYRLWRYYALRVHRQVCDRISLLFQVLARMQYRVMLNGGSNDVLSYTAAFRLYRAFNGPVVRLGAAACKKNFLALCVDCLRYLSAGFLHCLPGCARGAVHGGRVAKLAG

SEQ ID NO: 107703 - protein, 129 aa, Unknown
  Obtained from environmental sample
  misc_feature (1)..(129): Xaa is any amino acid
MQGDNACPLVQKLVERVLPVGSRFAEHHRPRVIRNRLAVAVHLLAVGFHVELLQMGGEAGKGLAVGQHRGAGVIQEVALPYADKGVKEGGVLQNIRFKRHLVRFRRAGKEFFEYVRAKGEGKNASAYRR

SEQ ID NO: 107704 - protein, 360 aa, Unknown
  Obtained from environmental sample
  misc_feature (1)..(360): Xaa is any amino acid
MQKDNVKTWQKNVSSITRQFLTLFNCSMLYGGGHPNTAKNAAIFADLINSCMDDDQTRREMITVIFHNGSMVIEDSPVDKSLNTGKLLSHFEKLAVTSVSLERGLRAESVSRLMEAAGDGDIDSLERCKAALSDIARGAASIPNIRINYVQYGKISADEAVVKAADVEAMGADLYEAIEVQKAAGRMMRSAAVINKEISDLTAHAIVKLVRDEYGSGKTPINRLAHTIRRMLPNNAELMNVLPQMKEMLLADGMSLGGYLELVRALGLKVENESLSDSLKEAEDTAAPELFILLPMVGSEGTDTVKERIVKTSSDGKFERAGQKASIEVKVSATVPGEDTKDLKSYLKVAKNNHSSNKNL

SEQ ID NO: 107705 - protein, 162 aa, Unknown
  Obtained from environmental sample
  misc_feature (1)..(162): Xaa is any amino acid
MGGGGDGRRFARVFLHLLCHLAAGLGLFLGGGHGPPRLGGEQVQVRADFFQQRDRIGDHLVAALHRFAGRDVVLGYLLGRCGAALRQLSDLFRHHRKALALLAGLGGLYRCVQRKQVRLVGDLLNDAYGLGYPARGLRYLLHRALGRVTCRVALVRGVERGV

SEQ ID NO: 107706 - protein, 177 aa, Unknown
  Obtained from environmental sample
  misc_feature (1)..(177): Xaa is any amino acid
MSATFLLSSLPTLELGAEVPFSVQELRRRCEGMDGVNLSDFDAVVAGSPGSHKFTIDYANALTEIKNATAAMRASKWEGENIRVSERSYSNYHVALHQKIAEAMNIQNPYEREVALERARWQIADELAGVDYFSEAKIYAYLVKLQINNRISGLSEEAGKAAVEDFIKANDRQEVAN

SEQ ID NO: 107707 - protein, 277 aa, Unknown
  Obtained from environmental sample
  misc_feature (1)..(277): Xaa is any amino acid
MPSGLNATEVTSLVCPEKVLNSCPLATSHNFIVLSHEPESIRVLSGLNATETILAECPEKVLISVPLPVSHSFTVLSSEPERICLPSGLNTTEKTILVCLKRVLITCPFAVSHSFIQFIQKLEMVCLPLGLNATDSTEDEFPEKVLITCPLTVSHSFTVLSLEPERTCLPSELNATDRTIVLCPEKVLSSRPFAVSHSFIVLSPLPPEPERTCLPSGLNATDQTLSVCPEKVLISRPLATSHSFIVLSPEPERTCLPSGLNATDQTLSVCPEKARPI

SEQ ID NO: 107708 - protein, 272 aa, Unknown
  Obtained from environmental sample
  misc_feature (1)..(272): Xaa is any amino acid
MFRAEDXCDPNILGFTSDIAKQVDILDACIVYCLMGDNIKISVRSSVREIMASEFAAFVCAGVGSGGGNIEMAGGFLRADEDYFIQKVRDYLENFDLIYAGKTQVDFASMKRWRKKAIPVGFVKTEDMFKEDWPVTVRTLEGDIDLRAGKNIYVMIGIVGEVYPILREKFEKNYDVLDTPYDLKTEYTPEVIDKISGNKLMLTDYAHACIPKGEKIVRAAPVDKPTKVFSYWDSEKYFSAVKGDFLTANETDLSGCYIVNRQIFFDTYEEIT

SEQ ID NO: 107709 - protein, 142 aa, Unknown
  Obtained from environmental sample
  misc_feature (1)..(142): Xaa is any amino acid
MFFICFYCCFYNMQNLIIIPADFYQGACVFGETGTAVSGTRMKKLGTYPPVFTHRPSDILHIRACFFAKVGNFVYKSNFNRKESVGCVLNHFRRFKVCFYKRSFIQIQGTVNVFHDIARSFAFAADNYAVRMGKVINSVPFP

SEQ ID NO: 107710 - protein, 109 aa, Unknown
  Obtained from environmental sample
  misc_feature (1)..(109): Xaa is any amino acid
MTATFLYYRVFVRGDGSGGGGGGYPISTKLLMTGSETTVSEMTVSESTRSETTVSEMTVSESTGSETTVSEMTVSEMTVSESTASESTGSETLPAAARIAARISSSMSI

SEQ ID NO: 107711 - protein, 120 aa, Unknown
  Obtained from environmental sample
  misc_feature (1)..(120): Xaa is any amino acid
MEQNVKSIKDTLFKTLERLSDEKIKGAELCSEISRAEAVVNVVAQINNTADTVFKAAKLLHDIDPKNLKINEMLLTAVGVTDEKAVVIEQSEAIEQPKAKNQPKNLFAKKVGSNNAPVDE

SEQ ID NO: 107712 - protein, 152 aa, Unknown
  Obtained from environmental sample
  misc_feature (1)..(152): Xaa is any amino acid
MYVYGTIRHRIIVSPDCGDEPLAGKNYVGVAHKLGKEGKFRGKKIQGRFVQKDRMPLDVYAEFSVLKDFFWRAFVFRGSRFFPPESRAYPGGQYPRAVRFNHIIVSSQFQSGDYVGFLAAGSTHDHRQGLGSFIFPDFFEGFKAVHAGKHNI

SEQ ID NO: 107713 - protein, 112 aa, Unknown
  Obtained from environmental sample
  misc_feature (1)..(112): Xaa is any amino acid
MSSPAANSPTATATPPAPKSLQRRIILPTSGSRKSRCILRSVGALPFCTSAPQVCMDSSVCSLDDPVAPPHPSRPVLPPRSTTTSPASGTRRATCDLGTAPTTAPISIRLAM

SEQ ID NO: 107714 - protein, 157 aa, Unknown
  Obtained from environmental sample
  SIGNAL (1)...(21)
  misc_feature (1)..(157): Xaa is any amino acid
MSMPTAATGICLGICTIESSASIPPKEPEAIGTPITGISVRLAITPGRWAASPAPAIITSVPPASTALKTSASSSGLRCAETAYETQETPNSLKTSAAFFIVWASDFEPKNIAAFMSLRLPFFACTGCLLSDQNIFQYLPFLIKIQARVYKQKMKLR

SEQ ID NO: 107715 - protein, 121 aa, Unknown
  Obtained from environmental sample
  misc_feature (1)..(121): Xaa is any amino acid
MGGAGEHPPQVNHQGDVRNLDYIRGLRAALRPAAQRGPVAPPPERHLQGPCPHSPRFGQDRRSQGDGGLSARHAEGGGFQPHGCLGKDAESRPPAHRGRGTSAPSRGHHKGCPQVFGGHSG

SEQ ID NO: 107716 - protein, 168 aa, Unknown
  Obtained from environmental sample
  DOMAIN (7)...(135): NUDIX domain
  misc_feature (1)..(168): Xaa is any amino acid
MKERIILQNSAGIFLRRNGYYLLMKRSPKKKIAPGVWSCVGGHFEADELNDPLAACLRETREETGIPADRVFNPELRYIIIRRKENIIRQIYIYFGETDISEVKNNDEGTLHWIPEAELLNREFSKTFEAMLWHYKNTPVVDRLVVGVAENADGTLRMNWSVAEDFEL

SEQ ID NO: 107717 - protein, 124 aa, Unknown
  Obtained from environmental sample
  DOMAIN (21)...(76): Helix-turn-helix
  misc_feature (1)..(124): Xaa is any amino acid
MFLPIFSFNLLIMDTSLNDRLKQARKALNLSQKQFAAGIFLKGSGYIGDIEIYRHEVNERIIELVSSIYGVNKAWLKTGSGKMFEGTKLDKQLHEMNILFNQLNPHFKGYVLSQIKQLIKLQKL

SEQ ID NO: 107718 - protein, 136 aa, Unknown
  Obtained from environmental sample
  misc_feature (1)..(136): Xaa is any amino acid
MGAAESAYVYSFAASRPSRDNNFYSVVLLFPQTGVSPLLNYRDSAVILPGEDKTLALDVEAGAEFLVTLYSKQPLDIQALMRRFVSAKGSLGERLATAVGNNPLLSLSYNAKEAAFTATTDDSRAVAALVAAIEHK

SEQ ID NO: 107719 - protein, 176 aa, Unknown
  Obtained from environmental sample
  misc_feature (1)..(176): Xaa is any amino acid
MIKKSPVVQTKLLWSFKVVVRKHRTFGTQFPNDGITFAVFIQMLYNNSMNYLEMLPVSSIAKYAKGHPGDGIPFTGYPRANPSEKDKLILVNDPLGPEPVVLEFKLDDILYVEEIPSAVTTAGEGVPLVKLWIKRGSAGMIIEPFEVDEINTPIQLAGRVQVIKERILQTGSQAAR

SEQ ID NO: 107720 - protein, 304 aa, Unknown
  Obtained from environmental sample
  misc_feature (1)..(304): Xaa is any amino acid
MKNIRDFKSLLSWLSHELNWDVGIDDYDDIEDITYNFDAKDIHLKPEEFAKITSLKQLRPLYEKQPWGIFAVEFEGKRLEVNSLRKILSGLVPKRRNRDHAVWDKKNLLFFCFWGERNNRSFGAVHFEDKANGLPSIKAFFVSPKNEDIMHLQNLEEKFKKLSWPDLPRNPSQADYERWHEQWAGAFTSIYRQTIRDSITLTANLAEIALSIRRNILDIFAVETENGSIHELYGKFKKALIHDMTEAQFADMYAQTMVYGLFSARCMIDMKNSNDDDQCSDSKKHFEPRQAIDAIPSTNPLGRF

SEQ ID NO: 107721 - protein, 281 aa, Unknown
  Obtained from environmental sample
  misc_feature (1)..(281): Xaa is any amino acid
MVCSIMDSMKGEMQYVGKINKLHMFDNPEMPYVPPPYPESKKLYIVDILPFEPRDGFTQAEADSVSSLFARYLGAVWGIMLLERGTIDEASNVNCVISGSISSLLDQILISIKMVEPNGNDVLTGDLKVDSLTGLMTPIQAYVEQLVPSLPGSRGYYAIGDTGPGGGTVFYSFYGHYMEAKGEIGVYSWDNALALAKSNRAGGFSDWLIPTAYELNMIYQNLKMKNLGSFLDDYYWSSSLTHDSGYNFAWEQNFGNGLKNCFLSYTRVSNVVLFRHFTLEL

SEQ ID NO: 107722 - protein, 158 aa, Unknown
  Obtained from environmental sample
  misc_feature (1)..(158): Xaa is any amino acid
MREFDLYAPMCAWLQQYLYDKYKNFEVIVVDTHSERLDHALQKFGIVSDIATGIDIQIDVLGIVRDSKVFKLFFIEAKKTSLTLKDLGQLWAYCKLIDPEEAFLLSSSDLGSLNKLMNVYNREDLLNFGDGKIIKKMKIGIWNTKTILQNITLCFPKF

SEQ ID NO: 107723 - protein, 154 aa, Unknown
  Obtained from environmental sample
  misc_feature (1)..(154): Xaa is any amino acid
MAPPPKKKKIFFFFFWGGGGGKIFFFFPGEKKNFFFLGGGGGGFFFFFGGKKKKKNFFPPLKGGGFFFKANSSGGRNPYYFVIRYGPGCCGNDGLVGFEVAWDKEKERPYPADDSWVEAEGILKSYEEEGYQLSYIDLTSLNVLAKRGAETVTQ

SEQ ID NO: 107724 - protein, 203 aa, Unknown
  Obtained from environmental sample
  DOMAIN (5)...(189): Amidohydrolase
  misc_feature (1)..(203): Xaa is any amino acid
MKGNFSSRQIFSPSEFKPYFWFVPSYIEKGINAKNAFENLPYKGIKIHPKLGRWNFSDKKQAKALHSLFGYASENKIPVLIHTGPDSFEKPELFEPFFIEYPSVKFTLAHCRPVYESIAMFALYKNVYGDTAFLPKEDLQKIVKAGFGKRIVLGSDFPITHYFAVKYGKHKSRWTLRKQYAVDAKKLEFYLSLINKSNKGEHL

SEQ ID NO: 107725 - protein, 370 aa, Unknown
  Obtained from environmental sample
  SIGNAL (1)...(22)
  misc_feature (1)..(370): Xaa is any amino acid
MNRGFFDMAFLVLLLLFGYSLAAQEPIPQGFAAQLKAAQQAQQAQQAQQPQQTPQEAPQVPQLGQPAQSDSAKVEEKKAEAPPPPPPPPPKKSPYPFYEAYLDSIEFIAISLLPARITLDSMKSVINAEFGTEKNKQLKITALEKQHEAKEKKVKEKLTSTIRLSQDIQPEWGVLLQKNEKEVSEYQKRMDVFKGKISDMNVMSARIKSLLAKLQIDSSYIETLEKKNMLYIKRMERACELMQDYAFKEEAQVLSTERKKFPMTLGEYNENKGELQVNIKDFSSNVPFDYHGVIKMKQRQAETIDNETDGFTAIIDYINYPFVVDGVKMYPGAKKAHIYYEDDELTTIGAFKAIEGFDWREGYSQWATTR

SEQ ID NO: 107726 - protein, 280 aa, Unknown
  Obtained from environmental sample
  misc_feature (1)..(280): Xaa is any amino acid
MSVDGMREEQKAIGEKITIEIKKEWADKEIIVMACMNSFSEKVSQRTAVTALAQKDAATPKKDTAVSKKDATPKKDVTPKKDATPKKAADVKAPQCSGGAGETTQNTAPKADTAITARLTRFIFARRTTIGKFEMFHENKSIFNCYTCEDVIRGKVYAPDEKTVKKWKIIAETAIPYGTYLCQRTHEQEGRMWEVTKVSGYSGILIHSGNTENDTEGCLLLGSAIKDNNIMGGTSKPKVSEFEALMKTHGNQNFTIEIPVPETDKATVTAKQNALNPRPI

SEQ ID NO: 107727 - protein, 164 aa, Unknown
  Obtained from environmental sample
  DOMAIN (17)...(100): Transposase IS116/IS110/IS902 family
  misc_feature (1)..(164): Xaa is any amino acid
MQDKIKEYAEPFMKEIQILTSMKGISVFIAIAIIADIIKVDRFKNSKAFTSYLRSAPKVANSNTSVNIGRTNKRGRKLSSSLLTQSMHHVLNASEKLDSWYSQLTEYKKTGLVRCALRRRIFAEIYQMLKKGEYHYGRDAEKHEAKMRQYKNFLEKRKNLVKTA

SEQ ID NO: 107728 - protein, 140 aa, Unknown
  Obtained from environmental sample
  misc_feature (1)..(140): Xaa is any amino acid
MSAHPLRKGVNHDVSSVLNGAPEVWSCECPVHDQGNFFLVGDLSDLGHVRHVEGRVADGFDIKGFCFRRNCFFKILWVSRVYEMRLEAKLRKNRVEHCVGSTVEVNAGNDFVSHLSQGRYSVVNRAGPGRDGNGGRAAFQ

SEQ ID NO: 107729 - protein, 270 aa, Unknown
  Obtained from environmental sample
  misc_feature (1)..(270): Xaa is any amino acid
MAFSRERNVPVFCGEFGVYMIQSPAKDRVKWYEFITGALERRNIARASWDYFGGFGIFNNQTGGDFSADVNVDVVRAMGYVPPPQRTLALKPINSGFTIYGDYPSRDFSIGYWGENAFFSMYDTNAAEGEYSIRWGNAARYDTFWIEFNRNGDFSHLAESGYCLEFRARAEKPVNFDIRFVNPENASSIPWRMRYSINEKTLPPDGKWHLIRVPLADMAEHGAWVNATQTWLGPQGKFSWKDVKQLDFVAEEGDLKNCYIGFDSIKIIKP

SEQ ID NO: 107730 - protein, 150 aa, Unknown
  Obtained from environmental sample
  misc_feature (1)..(150): Xaa is any amino acid
MPQGGNIEGKYIDPVIKITAKFSLLYHCFYITVCGREYSYIHGLGNIRTDFFKRLLLNYPQEFGLERQGDISYFIKKNCSFVCQFKASRTVLESAGKGSLNMAKKFTFQKAFRQGRTINPYKRSRAPVAEKMYPFRKKFLSHSAFSQDQY

SEQ ID NO: 107731 - protein, 204 aa, Unknown
  Obtained from environmental sample
  misc_feature (1)..(204): Xaa is any amino acid
MKAIELSYSVFSEKLWNYDPNSGAEFWDWTRNMNAYKEGRTAMWVCYSWLFPNPAEPENQLPFNYTAVPFPKGPDYNGKTWFTDFEQGMVIPRGGKDTAAIWEVWDQYHRWYGVDFEMRDDVSDNWQMAYFKTERDAMRIYEAASEMAKLDMGNTVTVDDIGYSWCIGGFCQAFFENTATPAQIVEENRQQRQDMLDVVFGALK

SEQ ID NO: 107732 - protein, 270 aa, Unknown
  Obtained from environmental sample
  misc_feature (1)..(270): Xaa is any amino acid
MKLDYKVRESSHEFLQKFVTRILAGINIADISDEYWNFAEYQNDMTVQRIIKNYEVICNFIGKHDLSFDYVENCIEFWYYDTNMSDQGEELYLYMNSRGETVSPNESIKANLLRGLTNQEKHDWGTKWEQWQDLFWSYRGENLNADNGIDEFLKWIKFVELTNSDKEKPNYMLADKIETIKKFKKIDLDGLSLDIIERYYNALQKLIALKNELNFDICWLAGCSTTQKHDISTIDYIKLIPMLMYVKQYPDSDALEIRRFARFFQNITRF

SEQ ID NO: 107733 - protein, 226 aa, Unknown
  Obtained from environmental sample
  misc_feature (1)..(226): Xaa is any amino acid
MPYTINWAVSGYSSLAYNVPLLSQAGYTEPPKTWAEFEQMCIAVSKVTPGKTFGTYMPLKYANFPVYVAGTLAPSYGKFFFDFSAGKFCFSDFVEYFEMYQRIRAAGAMFPGIESLDDDTARAQFAEGNIGFILVNASFNVGVLYDQFPTKMEWKIAPVPQKDPNMRYNVMGTTATSLVVSKKAKDEKLLEEVARVFAYFISDEVAGTLFTNGKDLPMNPRVVQNA

SEQ ID NO: 107734 - protein, 255 aa, Unknown
  Obtained from environmental sample
  SIGNAL (1)...(48)
  misc_feature (1)..(255): Xaa is any amino acid
MIEKTDKKLSLPSRVHPAVIAVWAALVSASHIIPSVPMLGTGSNFSFAAALSPLSGIFFGPIAGALCSAAGGFVGSLVAPHTGWLGLGTFILGTVTAFTSGCIAWSDSTPVSINSRGALVVNGGIIVYLVGTLLWFSQETGRSLVLFPLVYYGAGFTALVTGSILAGRILAGKRHTLKFLAVWLCAFGGMTGGAAIGNFFSLVLYKLPRATWVYLTVAAPVERAIFSLGAAXIGVPLLAALPKVGIYVGPRNKEP

SEQ ID NO: 107735 - protein, 123 aa, Unknown
  Obtained from environmental sample
  misc_feature (1)..(123): Xaa is any amino acid
MQLHPVFEVVAHVVAAEWQHGKWVAANIANLQIKSGCGYFGTNYGTHEHAMIPVLCLVNKRYCAWTATAEQNSINWNASEFFKLWSNNRALLCRSGETAVAVSGWLLVFIGFILHPFVAVPVN

SEQ ID NO: 107736 - protein, 261 aa, Unknown
  Obtained from environmental sample
  misc_feature (1)..(261): Xaa is any amino acid
MPGVASTGCDMXGDFSAAHREVSSVHCHPPTTVVGDIAGGITGDFPAAHREGCFTTPHKHPATAVDCGIAGDFPAVHREGSTVHVHPAVAAIGGIAGNFPAVHREGSTVHIHPAGIAGDFSAVHREGSTVHIHPAAGIVANNRTHTHFQRAAGVYIDKRIIVIGAAPKGNIAAQQQGNAASHRKQRTAARKTYRAHYPVAIEHYGNAGFPAVGKVRRCKVFIGAYLNAIKITAYRVCFQPGEFRGKVCAWNGHLGTCENGV

SEQ ID NO: 107737 - protein, 202 aa, Unknown
  Obtained from environmental sample
  misc_feature (1)..(202): Xaa is any amino acid
MNSNYQDFEKIFKKVGVDDEIIAQILNVPYQESKKREQDNVNYCSAVIVKCNELLDFDIFSEAMFQRACCKSGFRLNNAKKIAKEYSEKSLEKKLELLGQQKYMGHPHLTENEEIYTEHCAGSGNPGNLKCSCWRFKGHIPTDCKMPLNYCLCCAGHFRFHYQTALGINLRVKKIVSSIFNEPPQYCSFLFEIIDNQQKKNR

SEQ ID NO: 107738 - protein, 153 aa, Unknown
  Obtained from environmental sample
  misc_feature (1)..(153): Xaa is any amino acid
MPAKRKYKDSVFTSLFKDMKRLLELYNAIEGTSYKDPNIININTLEGVLFANRQNDISSGNPLKEAIEKAVLYCIDKGILRDYLKQNSSEIVNMFNIEFNLKDALAVRYEEGIEEGIARGEAKGMKKLLTLLEKGIPLAEAKRRLEISKNYVR

SEQ ID NO: 107739 - protein, 239 aa, Unknown
  Obtained from environmental sample
  misc_feature (1)..(239): Xaa is any amino acid
MAEPEAAVCLDGHCVGFARRHHRPVVIRAHAGGGVPVSGVAEAELTVFIVPPRPEAAIGLERDCVIVPRRQGNPVVVGAHADWGVPVVGVAETELTPTVVSPRPEAAVRFDGHCVDSARGHGSPVIVCAHADGGTPTRGVAKTEPTVFIVPPRPEAAVRFDGHCVSAACGHGCPIVDRAHGGRGVSPIPVAEAELAQVIVPPRPEPSIAGGQGHGCLVEGHTRDWHVVGGDCDSRRVAL

SEQ ID NO: 107740 - protein, 138 aa, Unknown
  Obtained from environmental sample
  misc_feature (1)..(138): Xaa is any amino acid
MAYMTASPLNTVLVDTLVSPKYQPANVYPTLAAGVGKEESLPLVLVVADAVATVPPEASKYTVYAVGGGVTGCGVTGGGVTGGGVTGGGVTGGVRGGVTGGVYGIDSKTAFTVTALDGMVNLLLATVTPPLTTCHSLN

SEQ ID NO: 107741 - protein, 113 aa, Unknown
  Obtained from environmental sample
  misc_feature (1)..(113): Xaa is any amino acid
MVQQKVRDEDADHGDRSGPVGLRPLVRLLAPRAYLQGLHGADQLRPETLPQNDDGGVGRQVRGKPERRDRVGPQVLGERPVHARKPRHSDKRGRRGGRGRQIRINEVLARQRA

SEQ ID NO: 107742 - protein, 181 aa, Unknown
  Obtained from environmental sample
  misc_feature (1)..(181): Xaa is any amino acid
MPALKAKTALPNRYPFRSFRTVRMIIGIDIGSTTTKAVSLEDGKVVKKISTRAEDAITSASGAFGKIILENGIRMGDIKRILITGAGATKIEGELFGIPTEKVNEITASCRVVAVQAWRRAYLAQRHEVVELHHLAYVVAHVNGAQVKGFAAVLPLHLPYYLVLLGVDEEVAKALSAQAQL

SEQ ID NO: 107743 - protein, 123 aa, Unknown
  Obtained from environmental sample
  misc_feature (1)..(123): Xaa is any amino acid
MRFCGFAETALKLFVDGRQVPAEQIYDKNLNRISLSVPQVPVNAEIRVEFENAELARNDVLKMIFDFLDNAWIEYDTKNTVFRIAQGSDAAASALAALQSLNLPAPLYSCLCEILCASVNQTL

SEQ ID NO: 107744 - protein, 193 aa, Unknown
  Obtained from environmental sample
  misc_feature (1)..(193): Xaa is any amino acid
MLRVVATVRDPVVKARFRAQFYYLRLVQVDQRRVDRHFVAVHSGYRGQVRHFPESLHVLGPAVGVTGIVYTVYAYEYVRAVLVAPQPAERLRPSERVGEEDGVARRNVGHGYPNAKPAFGHVDMARRQSAAAQGRQVDVHDAVLRNPQKRRYALRRQKLKGVALAVRKTQRVELKPGLPRHNAASRAVQPAAQ

SEQ ID NO: 107745 - protein, 177 aa, Unknown
  Obtained from environmental sample
  misc_feature (1)..(177): Xaa is any amino acid
MGRPIVLDVPRKQWPRELFFSLGISVIFGFFFFLKKKNYRAGIILAGISMSLAGLVFGVAGLLLYFLNFFTNHDYTFQNYNMLFGTPLLLAAVPLGICYAFTKRPEKQIFYDALLRLIWFLTVLGIFVSMAIKLLPAFYQQNLTDQMLMLPLALLFAFQPAGLREVWEKYLSGFFRR

SEQ ID NO: 107746 - protein, 214 aa, Unknown
  Obtained from environmental sample
  misc_feature (1)..(214): Xaa is any amino acid
MIGDHAERRAGLASVVGYPRLVGQRLNDGLEDVGIVIGIDPLYHRYDALEAHAGVYVLRLQRVERPVFLAVVLDEDEVPQFAVTSVLAVHALYGVAVGGRPRRLVADIVVYLRARSARTGLAHLPEVALVAEAHNPLARYVGLALPNLRRLVVAIVDGGEEARLFEPPDLGQQLPRPPDSLFLVVIAERPVAEHLEESVVVVVAPDLLEVVVLA

SEQ ID NO: 107747 - protein, 122 aa, Unknown
  Obtained from environmental sample
  misc_feature (1)..(122): Xaa is any amino acid
MLGSELFHEKLGDGPGAAAFFHNLAEDRAEQEDGEEVLHIDHAPRHENFRVGRQKGPAGGNGRKKGADRGEQNDRQTAVGDIRQQKQRQNNADDHRASELQVTGFRASLPHRKTPSPSKHGA

SEQ ID NO: 107748 - protein, 455 aa, Unknown
  Obtained from environmental sample
  misc_feature (1)..(455): Xaa is any amino acid
MKLYKKKISXIVCKNNSTHKKRLMPFKTLYDNKENFWQVPDGTWAYYLSEEDYEKLKEKAVLKQGSWDKEIPAVLNAPPKKEEKKKDAETDQGYGNEYKTIKEMSDKQKVERLNENKTRLDELLAKKDVKQEVVTEALVDTTKSAALINHSALENAIYHADDVAKKLTQDLVDSTYEMVKSSAQLISEDIFKNELMNTMVEKSNGTVIQHMTRVYLNGIAFLSYYNKLVSGSSAIQKMRINFVNEYRKYYHTLLPHINIDDINLERVFYGGMRAITPEDYMKWAVGFLIHDIGKAPAVEYHEGVGSYNREIVIDHVKKGYNYAITKTNYPKEASLIIGYHHEYYGDPDGYGFFRAYFAKYKKENPLAKQDYCIGYELEPVMDFEVLAYFPAKVLEIIDVFDSLTDPHRAYRHPMSHKEALKLMREEFINKHHKLDLVLFDIFVSFIKEKEKEEEK

SEQ ID NO: 107749 - protein, 235 aa, Unknown
  Obtained from environmental sample
  DOMAIN (182)...(215): Tetratricopeptide repeat
  misc_feature (1)..(235): Xaa is any amino acid
MLNSEDGPNVYDIAAEALTKSRKASKYSGYDSAIEILDKAIKILCELGDDGPCEAADLCIERAIVHGYKNESDLELAALTMAIELRGFDWDYQKRAHFYERAGDYDKALADYTTALDREESPESYLWRGAVFFEKKDYDSAISDFLNSVKCCSWCGDMPNDLHGPMRRLFRKDNGKRCGECLESFYMCGLSYHKKGDLKSAIKYLNKALWRDSDFEKAKALKEFILAEEKRSVKR

SEQ ID NO: 107750 - protein, 154 aa, Unknown
  Obtained from environmental sample
  misc_feature (1)..(154): Xaa is any amino acid
MSLLVAARMRTFTVTVESEPTFSKLRSWITRSSFACKDRGRSPISSRNIVPPSAISKRPCRAATASVKAPRTCPKSSLSPSPSGRAAQFTLTKGKRPRGLRTWILSAKSSFPTPLSPKIKTEESVFATRSIILIISRIMGLLAIIVRIRMPVTR

SEQ ID NO: 107751 - protein, 290 aa, Unknown
  Obtained from environmental sample
  SIGNAL (1)...(25)
  misc_feature (1)..(290): Xaa is any amino acid
MRNRSRKLYMAHAFAAYLKMGNLNAATVAGNTFVTYRLEFTAITFPFLCRPENPFAEEAVFFRTKRPVVYGFRFLYFSVRPVPDHLRGSQPNHYRIKILYVPHYTLSCLEITLRLRNQLFIFFGKGNLFAIIVKNRKIQRKPPQFLHKNVKRFGNTRRCGRLPLYNGLVNFGTPGHVIRLDRQQFLQSMRRAVRFQSPNFHLAKALSAELGLAAKGLLGHQRIGAGAAGVHFVINKVMEFEEVNHPAENRVYKIFAGSAVAEHGLARHGQARLFEFFFNLFGRRGLENRR

SEQ ID NO: 107752 - protein, 120 aa, Unknown
  Obtained from environmental sample
  DOMAIN (6)...(100): Plasmid stabilisation system protein
  misc_feature (1)..(120): Xaa is any amino acid
MRVYNLAFSKILDDDIDSCYNYIKDKLEAPIAAEKLMKELYEKINQIKENPYSRPLVHDKLLASLGIRSIKVKNYLLFFNVEEENNNINVITFMYNKRDWINIVKKIHLDDIMDTSKNIG

SEQ ID NO: 107753 - protein, 125 aa, Unknown
  Obtained from environmental sample
  misc_feature (1)..(125): Xaa is any amino acid
MDRFYGVMSKILTVGGFVSHDIDFRSHGETYEWNGHWAIPEKKWKKIRGTRPYVINREPLSTHIRLFEKNGFKIEVKVPCLGATEGKPSVKRKKLADRYANLSDEDFETSTCFVIARKTEDGRSE

SEQ ID NO: 107754 - protein, 112 aa, Unknown
  Obtained from environmental sample
  misc_feature (1)..(112): Xaa is any amino acid
MSSPAANSPMATATPPAPKSLQRRIILPTSGSLKRRCILRSVGALPFCTSAPQVCMDSSLCSLDDPVAPPQPSRPVLPPSSTTMSPASGTRRATFDLGTAPTTAPISIRLAT

SEQ ID NO: 107755 - protein, 173 aa, Unknown
  Obtained from environmental sample
  misc_feature (1)..(173): Xaa is any amino acid
MPRRSKTELQGLVDKIVYMYINQGKRQQDIADALTTQGYHVSRAAVQRTLKSHARRLKELKEKQDWAETLIAATNKTPRLDIADAGLQIAAMKLLEEVDGVNFTDMDGEKKILLLTRVSRAIGLAANVELNFERGRKQGLLDAEKKLEEKAAALGIPDEKMAIIRAEVFNLKK

SEQ ID NO: 107756 - protein, 111 aa, Unknown
  Obtained from environmental sample
  misc_feature (1)..(111): Xaa is any amino acid
MDSIGRGHDREQFLVGYYDYRIDVFPQFADAVRGVSFAHFALKEEGARYYGYREYAQFLSDFGYNRRAACARSAAHTGGYEQHVRALKQAHHGVPVFFHRLTPNIRASAGP

SEQ ID NO: 107757 - protein, 213 aa, Unknown
  Obtained from environmental sample
  misc_feature (1)..(213): Xaa is any amino acid
MSNFILNLIHRPELVPEYAEKVTGHGKKEDIGSKSLLTESLDIFKLQQSIAHKNGLKTTIQMTYASLFNAEAVQIAKDDSGKYGDEIALSLLGLPCGEFREKYKTKDFCIWMFSMEDKKMIVDDVFGKFHEIFGFYPSSTGSYYMDAELINYIKEKYPSVICAIATCWEEGPKAYRTCNNSWYTLFDGGPWNPWIPSKQNTHAPASNENEDSG

SEQ ID NO: 107758 - protein, 123 aa, Unknown
  Obtained from environmental sample
  misc_feature (1)..(123): Xaa is any amino acid
MQSRPDHRGRHTRTARARRGIEEEAAVHRDAGGQVAGAHRRLPSEEERLDSRRRRLGLRHRLRRSGPRYSRRPRREPAGAGHRGLFQHRRPGVQVNADRRKRTVRQGRQAPAQEGPRHIARPI

SEQ ID NO: 107759 - protein, 107 aa, Unknown
  Obtained from environmental sample
  misc_feature (1)..(107): Xaa is any amino acid
MIARSLALPFVYYWMPSFRLTDKEKQEDGRYKKVYEKQPKTPYERLMESPDVSLECKTELERRRAGQNPVELNWKLNEAVRLLLKINREKLYLGKTSCQGGGRAPAA

SEQ ID NO: 107760 - protein, 114 aa, Unknown
  Obtained from environmental sample
  DOMAIN (12)...(66): Helix-turn-helix
  misc_feature (1)..(114): Xaa is any amino acid
MKNLRELLAFNMKETRNKLGLSQSRLAERAGLSTQYIAMIELMRKFPTPEILERIAFALEIDPPELFSIQIAEAQIRKFKKAVLTDIEKAVSGAVMQVIERNLEELESSDDFRG

SEQ ID NO: 107761 - protein, 174 aa, Unknown
  Obtained from environmental sample
  misc_feature (1)..(174): Xaa is any amino acid
MKNEFSCIICVADINITGALDQCLAELALPEVFIQRAKQMSLEDRHGFLGRQVTNLEESRAVIYRIYVPSEYEIGMVNRIVDATDLKMGGRGCIIVQHIDNYRANHLFYDTEKLDKLCGKAGRVTQKQHALISCIVSRGQGNLLAEALLELGICVPIVFFGTGVXIRDRLGLLR

SEQ ID NO: 107762 - protein, 176 aa, Unknown
  Obtained from environmental sample
  DOMAIN (43)...(170): GtrA-like protein
  misc_feature (1)..(176): Xaa is any amino acid
MKEKMTNAVSFRRILRKLQTVITKIIDFFYPPFRKIMPLSFFRYGFTGVANMVFDWVLFFILYNFVFQKNLVDVRFVVLTPHVASLLVVFPITFLSGFLLSKYISFSDSILRGRVQLFRYLLVVAGCLVINYICLKLFVDVCGFYPTPSKMLATIFSVAFSYFAQRNYTFQKNESL

SEQ ID NO: 107763 - protein, 127 aa, Unknown
  Obtained from environmental sample
  misc_feature (1)..(127): Xaa is any amino acid
MRGHGKKALQIDEWKRACRNGSDYKPVDGNSYPYPYGDEFDANKCNTLGNSKSKNAPMSAGALGECVGALGVYDMSGNAAEWTASAAAKAQAFGGFYQSGAEESGCESSVTLDKDKKYLYAGFRCCK

SEQ ID NO: 107764 - protein, 158 aa, Unknown
  Obtained from environmental sample
  misc_feature (1)..(158): Xaa is any amino acid
MRITVAVILQKANHFHKVFNALDDLVIGHFQKPALLVYPHRLGDDVAGGHSGVQKAIGVLKDELHIPARFQKFAALHCRYVLSVKVDLTGSRCVKTRYRADNGGLAAAGFPNEAEGFTLLYAKRDPIHRIGISFLAVYYSPCSRVKIHPQVFYIKQVV

SEQ ID NO: 107765 - protein, 160 aa, Unknown
  Obtained from environmental sample
  SIGNAL (1)...(40)
  misc_feature (1)..(160): Xaa is any amino acid
MSVTGATCGTVTGVSGSNIACGNITIQAASSSSVAPSSSSAPPPSSSSVAPSSSSSAGATCTDLDLSTSKTVISGKCYKITKINNGGQNGNSDCGEIKLDCAGDYDGGNCNKDCVVNDVTYKCNSSNNVIGVGINLLNTNLTTSGTNTKSWNIFCSYKAN

SEQ ID NO: 107766 - protein, 186 aa, Unknown
  Obtained from environmental sample
  SIGNAL (1)...(20)
  misc_feature (1)..(186): Xaa is any amino acid
MNKLIVIIGFLSVLFLSCPKEDPDIDPIDASGVTKKSFYVHNFKTGRADLVETGLLADGKNCHVWVGRGSNITKAKDLAKSIANTYDNNIYNKMMQYFSFSKDDGLNYDGKILNNTLDMINCLVKGDGKLNIVLVDIPDNYQQGVNNAYTAGYFLNTDXYEQKSNPYXNECAVIFIDTNPGETGFR

SEQ ID NO: 107767 - protein, 296 aa, Unknown
  Obtained from environmental sample
  misc_feature (1)..(296): Xaa is any amino acid
MFWPCLPHGGVFWSGELLQSKALNMEDAYARPHAADWRRWRAFASLTAPVFLQAPLASVREPDAVPSVLQGTLREEINEQLPLEKRQLRCAGIEKACGENFTTLICLPNAEARWAITECRFEKKHVRRTPQEPPIHHRVHKSARSRKLAPLFTPSVDFNEFTYARNTHMRMLADNYLVAANGFPFDIHYCDLKAVQDGLCCAFIDQMLPPGSRLLEVGGGNSRVLPVFRTEHECWNIDRFEGNGNGPLTPSRGGWKLVRDYMGNHNPELPXKYFDMVFSISALEHVPEDPATTPAS

SEQ ID NO: 107768 - protein, 278 aa, Unknown
  Obtained from environmental sample
  misc_feature (1)..(278): Xaa is any amino acid
MLRINHEATGTWFAFNKRYTYQQVADFYVRFHKNVKQHAPHINTILCIGGAHKTESGKLGYEDEFAKAIAETDIWSSDTYLSLHWGWPFDIAEPGGKSHKRSINKDILEGLCFDFERFSARAGKPKPFVLSEINADGDVNGPYEQAEQLVDFYRRIPKEAPDITGITFYQFRDRGRLGLEIEDPNNSNVGVAQPFLEDYKKIMADSYYSPKMEQGEKLSLPVKLRWGSSEDADGITIPINFEDNPVFCEVMFSNSEDAEKLNAMMEINGKWFYKKXGR

SEQ ID NO: 107769 - protein, 226 aa, Unknown
  Obtained from environmental sample
  misc_feature (1)..(226): Xaa is any amino acid
MYLSAGCQGETVHKKHIFGDFVPAYFIPAIVAHVFHVHFYVGMKNHKSADFLAVFFAGDADHRYVFDSRHCVEVVFDFLGGNIFPAADDHVLDAACNLEVAVTGFNAQVSGMEPACLVDALCCFLGHLVVALHGAVAPAAEFAVCTILTFIAGFRVADCYLNAVKGAAYGFYFHFNRVVKVGLGHHRGGLSKTVADGYFAHVHKVDDLTHGLDGAGRACHYSGTQA

SEQ ID NO: 107770 - protein, 191 aa, Unknown
  Obtained from environmental sample
  misc_feature (1)..(191): Xaa is any amino acid
MHHDAAVRIVMAVENQRPKRGVFVAFGRRNMFYNGLKKLVNAGAVTRGNQQGAFRVQSQILVDLFFRAVYISRLHVDFIDNRHDFKVMFQGKIHIGKGLRLHPLRGVNKKQRSLAGVDRPAHLVGEVNMARSVNEVKLIVIAVLSRIGDSDRLAFYGNAPFPLNIHVVEYLVLKIAVVNELCLLYEPVCQR

SEQ ID NO: 107771 - protein, 218 aa, Unknown
  Obtained from environmental sample
  misc_feature (1)..(218): Xaa is any amino acid
MGKRKTNNEWRPAVFYKNTTWKRKKFGESAQTPRRPFKFPGKFLEPEKNGGGKQEGKKIFPGGTPKKLGGKNFRGKKKTPFFSGGGKRKIKGEKKIFFSGEEVFFFLKKNFFFWGGGGGGGVFFPPRGGAPTGGAGEKKKSGGGKKTPGEKGKAYKIPLNLWGGGGRGGPPPPPAGGFFFFFPPPAGEKKTPPPPSVCCFLKKTRREEGRAPPLLFFF

SEQ ID NO: 107772 - protein, 213 aa, Unknown
  Obtained from environmental sample
  misc_feature (1)..(213): Xaa is any amino acid
MLRNTGFPLGRDPDAGLPGRRAPPLRQRLFPARGSERKRSSRLPAHAHGHAAPVQVFLEFPNGIFAVVDDGGDKRGCGASLRHGVVKMSGCARPAGGDDRDTHGLADHAGQGQLIALLGAVGVDGVDAQLAGAQLLATHGPGHGVHLHALAAAVDDDFIAGRHLFRNGRPAYVHTDDNGLGAEGRRAPADEVRVFDRAGVDGNFFRPRHLGRF

SEQ ID NO: 107773 - protein, 118 aa, Unknown
  Obtained from environmental sample
  misc_feature (1)..(118): Xaa is any amino acid
MLKVVAHVVAAEGQHGKWVAANIANLQVKGSSGYFGTNYGTHEHAVVPVLCLVNKRDGAWTATTEQYSIYWNAFQLFKFRCNNRALLCRSGEAAVAVSGWFLIFIGFILYPFVAVPVN

SEQ ID NO: 107774 - protein, 112 aa, Unknown
  Obtained from environmental sample
  misc_feature (1)..(112): Xaa is any amino acid
MSSPAANSPTATATPPAPKSLQRRIILPTSGSRKSRCILRSVGALPFCTSAPQVCMDSSVCSLDDPVAPPHPSRPVLPPRSTTTSPGAGSRRETCDLGTAPTTAPISIRFAM

SEQ ID NO: 107775 - protein, 173 aa, Unknown
  Obtained from environmental sample
  SIGNAL (1)...(72)
  misc_feature (1)..(173): Xaa is any amino acid
MQTLPLMATIPRPILFLIIRSNLNTTSESRSSVSFFSFFNRVSTCFFFSVTSSSMPAFFSASSFSCCSMRAAYCFICSSSSRSCLSFCCTSLRYNCSFSSAAWRSLSSASYSRWVLISEIVRSAFSRAASASCSIPRASSSALFIFSCSTFFSINNFRVLLYALPALPTVGRR

SEQ ID NO: 107776 - protein, 134 aa, Unknown
  Obtained from environmental sample
  misc_feature (1)..(134): Xaa is any amino acid
MLAPQITLPNTAEDLPRIEAAGKGLCLLINEKASKEGGRFASMFKQLVQLLSNYLNEAAQFDQAIRQQYAPKLRQKEEELSRRMGREVHIDPFQDPEFVNFYNQNFNALKANYQAPVDQVREEAMGIWNEEPTP

SEQ ID NO: 107777 - protein, 355 aa, Unknown
  Obtained from environmental sample
  misc_feature (1)..(355): Xaa is any amino acid
MHRRGGGHGVRRQPYTQEEAIDRRPQRDSYGDTCRVQPPPRPAVVDGGFGFGFRDSRGQDGFRRPRLQLHKPGLGRTRVSGGKLSGSNDKLSAHVIRQRKRAGDKGGGRVRHALRRRLVGDVRIGINAGGCGFREERRGRRGGFLGGYRGLGCKQVRGGGIVRRGHRVYRGGLRGFGYRRRIVGHAAVRDKACVCRERLQTGRFFARSKRPLLRQRRRLHRGNIRARAACRRNIFDIDTGNRLPHTFRLHIHGIRALLAGKQDGRVLHGRISDSADAPHIGGRVILGRVLHGHRPCNLPHHADGAPALRHRVRRAHVYNKEIRRVPRGGIFFDSADEPRCAAHRPLHEAQNIRAR

SEQ ID NO: 107778 - protein, 150 aa, Unknown
  Obtained from environmental sample
  misc_feature (1)..(150): Xaa is any amino acid
MDLENMFTPETSKQINACLSQYEKDSHIYYLHKGNPVYCHGKEDHNSYRFIVGNLICNNLCTITEFHESTGEARKNIERYAKTFRTQGAAHFFSRKETRGQCYKMTDELKSEVQKRLDEGWSGYRISKEYDISEAAIRYHKKNGNLKKKT

SEQ ID NO: 107779 - protein, 159 aa, Unknown
  Obtained from environmental sample
  misc_feature (1)..(159): Xaa is any amino acid
MQRGVHHLDALAALLKQRGADGAPLDHIHERHVDLLIDHHQQTGLERLLLVHRLDRAADRQHLFYDGLVVRLHHLRPVVPVDLVPVVLRRVVAGRDHDPRGGLQPPDGERQLRGGAQPCEQVGLDPARAEDQRRLQRENVGEVAGVVGDNGGSPRRNRL

SEQ ID NO: 107780 - protein, 184 aa, Unknown
  Obtained from environmental sample
  misc_feature (1)..(184): Xaa is any amino acid
MKSPISDTGNAIRYGYACKAGATLKSPISDTGNAVRYGYTDKAGATLKSPIFDTGNAVGYGYACKAFTTPKSVHLNGGNAVRYGHAGKATATGKSSTPNGGNAVGYYYACKAGATVKSDIPNLGNAIRYGYAGKALATLKSVIFNACNAIRYGYVGKAGTTLKSAFYNAGNAIGYGYADKAGAT

SEQ ID NO: 107781 - protein, 197 aa, Unknown
  Obtained from environmental sample
  misc_feature (1)..(197): Xaa is any amino acid
MKTLEQIDNVQEKLGNMQVSISEVKNNILSILRQYENTIESLRELFLEILQNAIVFENDTNDGYFGISAKPNSSKNQLPFKIEVEIPKTEALGQSRLKIVAYDLMVFLHNINLKRTMPDFIIHDGVFHGISLNTKIKALNFIYRQHLKDPYFQYITTFNEDEIYKDLVGNLEFQLNDVIIAEYTDNPDEMIFKRDFK

SEQ ID NO: 107782 - protein, 224 aa, Unknown
  Obtained from environmental sample
  misc_feature (1)..(224): Xaa is any amino acid
MPLAKLMPEFLISSSRALILRVASKPSISGICMSIKIISYFSGSSLNIRSASTPFTAQSIPISVGSRRDCTISRLISTSSAIRRRRPRKDTCCSAALSASLKLSASSYLPRLSRTVKEKVDPRPSSDSSQILPPISSTICLEMASPRPVPPNLREVLLSACAKEVNRRDCCSALIPIPVSFTSICMVHRPSSSYRKRAFRCIEPFSGVNLTALVSRFVITCASL

SEQ ID NO: 107783 - protein, 189 aa, Unknown
  Obtained from environmental sample
  DOMAIN (114)...(171): FHA domain
  misc_feature (1)..(189): Xaa is any amino acid
MQCPSCKETIDDDSRYCDQCGEQIMVCSVCGRPGKGKRCIFDGKELVPAAGGASMPAVQAPAVQPVPQSNVASGGASGGAVNGDKIKLTSQIHGIMIEAGDGDIIGRKNGAFANVFGRFNYVSGTHCKIVKNAAGWHIQDMGSTNGTMYNGIQLVPNTLYPLISGTMIKIADVELTVTYDTAETGTSRL

SEQ ID NO: 107784 - protein, 116 aa, Unknown
  Obtained from environmental sample
  SIGNAL (1)...(50)
  misc_feature (1)..(116): Xaa is any amino acid
MSKKALVISTIFCPRQFITRRLSPVMRATTDASIFSAAACCSRAFRSVSAATAARRSCDSEMARSVPLKPSYFTGRASKLISTPSANSPIATAAPPAPKSLHFLISLVTCGSRNKR

SEQ ID NO: 107785 - protein, 201 aa, Unknown
  Obtained from environmental sample
  SIGNAL (1)...(58)
  misc_feature (1)..(201): Xaa is any amino acid
MNNVFRALKLDFCITKTSYSKLIMIYSISILLGLSTQPIMPVIMIMFFCVSFSGLAFSIIEKNACGKLYGILPIRKKEIITGRYLFGFISGIVNLVISIILAYIIAIFSKQQLDTSSLFLSITLAFCYYCFAVSISYPIYYKTGFSKSYIFITLPLYLLILLIVLLSEKTNFIENITQVLLYFFNPLHFVPICGSRADLSW

SEQ ID NO: 107786 - protein, 221 aa, Unknown
  Obtained from environmental sample
  misc_feature (1)..(221): Xaa is any amino acid
MLAVLLCFSSDGNSAAMPHSGVPCSAPPQGNNTDAAPIDPSKRSCKPRRLPERRDLSSCPRLTNASPGCTWRGGSLGSAFNCAGSKACAERGAPLVLRNVRERSTMVLPRHFIFRAAASLAVLPLSSLDVTVAIITASRFSAAAKLIKASASAAAHTTAIRSCDSEIASSTPSSPAYFLGTLSRSMSSPAASSPTATETPPAPKSLQRLISRAACGMRNSR

SEQ ID NO: 107787 - protein, 154 aa, Unknown
  Obtained from environmental sample
  misc_feature (1)..(154): Xaa is any amino acid
MVPVTGNTPATQSLPQSGGVSAPTVQTHGMQPIPQSGSAGSGVSLASGDKVKLASQVHGIMIEARDGDIIGRKNGAFTSVFSRFNFISGTHCKIVKTAAGWHIQDMGSTNGTICNGMKLVPNTLYPLISGNTIKIADVELIVTFDMTEGGTSRL

SEQ ID NO: 107788 - protein, 204 aa, Unknown
  Obtained from environmental sample
  misc_feature (1)..(204): Xaa is any amino acid
MEGSSRAASLNSAMALSQSCWSRLIFPNVEWGKARLGSLGMASLANADALFKASGAEGELGFRAYASYHASAISASFCASNLSSPGGIRERASAKALSAPAKSFFSSNAFPCEIRSFTARIRSCNSREAWASASASAFCLAASASRCNLSFSARCWARRSASASAALCFAVSASRCCCLSFSARCWAAVRWASASRCCLSVSER

SEQ ID NO: 107789 - protein, 228 aa, Unknown
  Obtained from environmental sample
  misc_feature (1)..(228): Xaa is any amino acid
MTLPSEYYVENLYPLQNGVLNIISRSDTDFFLTGGTALSRAYYNHRYSDDLDFFLNKSQTYDEQLEKILALLGESGFVWDVQEDFIRTSNFAALRVGYKDSDVLLKLDFVNDLVPHFGGIQKTDLFCRTDSVRNILSNKLSAVYRYASKDVADIWEISRRESINWAEIIREAKQKEAGLEITYVCEILKSMPQSEFESVAWVTKPDWAVFCDDIGGIVNDMLVGAAGY

SEQ ID NO: 107790 - protein, 273 aa, Unknown
  Obtained from environmental sample
  misc_feature (1)..(273): Xaa is any amino acid
MLKFILVAFAAQTEGVRDFRVAGEGLGVVVLRESPHLGRDFDGVVAQHLVYHQRVGHAVRYVVECAEFVRHRVADAEESVGEGHARYGGGVGHSFPCDRIRCAFVVSLGQPFKYHLDGLYREAVGEVRCHDRSVGLQGVGQRVNAGRAGKSLGRVHLHVRVNNRHFGHQFVIRKRVLHALCFVGDDGKGCYLAARSGGRGYRDKVGFLSHFGEGVDPLPYVGKAHGHILKIRFRMFVEHPHDFAGVHCRAAAQRNDNIGLKSGYQRRASLGAA

SEQ ID NO: 107791 - protein, 111 aa, Unknown
  Obtained from environmental sample
  misc_feature (1)..(111): Xaa is any amino acid
MFHALAQRSLHLFGDGHAALGVHYRRFYEVGGVFGGVRASFREVAHLAGHHGESLAGISGAGGLHGGVQGEEVGLEGYAVDGLHDHGCVVARPFDLPYGLGHAVHGDRHFA

SEQ ID NO: 107792 - protein, 146 aa, Unknown
  Obtained from environmental sample
  misc_feature (1)..(146): Xaa is any amino acid
MYDLLPGRQGSISRSTDRQRRSCTPGWATCPRSSPGRTASSWAGRWSTSPANWGSASSSTWEWACRRSATPKRSPRRSTRQRGWSTWTTIRSWSPTPGRCWPRTPPPGWLTPTPRTRPASCRPPRPSGLSTSASRWPSCSWRCCTS

SEQ ID NO: 107793 - protein, 231 aa, Unknown
  Obtained from environmental sample
  DOMAIN (167)...(224): Bacterial regulatory proteins, luxR family
  misc_feature (1)..(231): Xaa is any amino acid
MATDVLTMTFSRRIFTADDKPLGIISLDIVLDKVRELAINTRFAHSGYGILMNSQLDILAHPNKAYWGKNMTDVSSSFIPISENIKQGIPISEHRITNYKGEAAVAFTRKLQNGWFIAVIIPENIYFKEMRIMRLVIVIAGTVLAALFITLVLLLYKAQKKLQSFGLTNLTARETEIYNLLLTNLSTKEIASKMELTYSGVNFHIQNLYNKLGIQSRTELLAKFVSKPDSE

SEQ ID NO: 107794 - protein, 199 aa, Unknown
  Obtained from environmental sample
  misc_feature (1)..(199): Xaa is any amino acid
MTLTGRLTMDFTEPIEQLSMDAARIGAGDLDHVLVANTGDELEILAASFNAMIDGIKSITAEKERLETASAEKTHEAQIIRESNQNLQSILYMLPIGIGIMDMDDSSILFANKALLDVLNCTSTGQVLGHNGFEFMPVIQPDGRKTADLIADLFQKESSAIEMQCVKSGGAPFTARIHSISTIFNGSRASIAVIEDITT

SEQ ID NO: 107795 - protein, 209 aa, Unknown
  Obtained from environmental sample
  misc_feature (1)..(209): Xaa is any amino acid
MDILVDLRKNVPNADFIPINITNNKEVMDKPGLRIFIPQSSPNKDAALKYLNWLAKPENYSFLQVGQEGVNHKKVNGIPQTVATPPQHPWFMNSPNNIDLTLPMNGVELGSDAENAKVLGLSYGTISPDVISNAYVTATTGARGPAVWRATTKVNQYMGDLRGKADDLISLAITAKTSNFSKVWDSGIKDWLNSGGQEVINERSSLYPK

SEQ ID NO: 107796 - protein, 124 aa, Unknown
  Obtained from environmental sample
  misc_feature (1)..(124): Xaa is any amino acid
MRRGDRVVQGAQRGVHTDLRRGGAKGQRSHRAQDTAPLQRSGSGQDDPPLQRLRRRRGGGGHRRIGRRTRHLPRRRPQKVRGARRNGTRHLRVAGAYGGGDRPVGLKTFRRRRRGRIGDRRRAT

SEQ ID NO: 107797 - protein, 124 aa, Unknown
  Obtained from environmental sample
  misc_feature (1)..(124): Xaa is any amino acid
MDGAGTGTRHHHHFGGHHLFLAQAPHQHHRHPRPRGLHRGSGAEPQGSGRRGGGLLRRGRLPAPVRDGLAPGRPLRRAPHRLHQQDGPGGGRLRALPAGMRDRLGGVPALINCPWARKTAWRAH

SEQ ID NO: 107798 - protein, 239 aa, Unknown
  Obtained from environmental sample
  misc_feature (1)..(239): Xaa is any amino acid
MSCAEGQMRIVISKDEGIEITNEMGEIKIKYRKLKLEGGKGVQSEGKKSVKENSEGEAEIKCKKGIQIESGKEVKVKGKNIKLEGSKGITTEGKQLAAEGDKVMGIDVHQMVIPSGSGTAVVPLPHPFIGKLGDKLSKDVKIKGHNAALKGSVAKHDDPVHNQLPGTIKFQSNPKKEGEVKNQIYTVNHFYFVNEEFADRFINSVKEGVGTAREYSENKNEKITIPERHKNSVVIFYGE

SEQ ID NO: 107799 - protein, 114 aa, Unknown
  Obtained from environmental sample
  misc_feature (1)..(114): Xaa is any amino acid
MQCQLHVATALHAERLYDVERRRPEHLVLFIGERNGWGDYDAVAGVDAYGVEVLHGADGNHVAGAVAHHLELDLLPSGDRLLNQNLANWGEGDTVCGNLPQGGFVRRYAAAAAA

SEQ ID NO: 107800 - protein, 176 aa, Unknown
  Obtained from environmental sample
  misc_feature (1)..(176): Xaa is any amino acid
MGMSKGLSYVFVTPYTVAKSRTGGVLSRLLTRTDLDLVGAQIFAPDQDFADKYSKALIERAPSNQLVLLADYVKNYFGPSGGRSHRTLFLLFRGENPCEKLLNVCGHLYTQHVEVDALAGETIRDTYSDLIFYNGNPNDVRYFEPAVLTPRKQEETNIDLSFNRSFLEGKEDYGQM

SEQ ID NO: 107801 - protein, 172 aa, Unknown
  Obtained from environmental sample
  misc_feature (1)..(172): Xaa is any amino acid
MEVPSAHGGGVGVRGAGRGGESRRRLFRRRLARREQRRSDQSRGGQSAQRSRHIRHERQRVGDGRRLVRGLRHGGANRSDRPDVRKLPRYSRRRVVERREGLPRLPPHEIFAKLQQRRHRLPLGYMRAEDDGGAAAALAAGVDRADIREKTPERSGSRRRRHKRRAAKGIPP

SEQ ID NO: 107802 - protein, 111 aa, Unknown
  Obtained from environmental sample
  DOMAIN (4)...(98): Plasmid stabilisation system protein
  misc_feature (1)..(111): Xaa is any amino acid
MDNLIISKLYKEDTLSTYNYIKNVLNAPMAAKNLINEVKEKLSYISKNPTHRPLVYDKYLASLGYRLISVKNYLIFYIINDDNIHIKIVRFLYCKRDWISILKENTVEEMM

SEQ ID NO: 107803 - protein, 280 aa, Unknown
  Obtained from environmental sample
  misc_feature (1)..(280): Xaa is any amino acid
MAGSAAALTDCRFFKARNVPVFCGEFGVYMIQSPAKDRVIWYEIITGMLERRKIARASWDYFGGFGIFNSPTGGDFSADVNVNIVRAMGFIPPPQRARVQRPLSSGFTIYGDYPSHDFSIGYWGEDAVFSMYDTNAAEGEYAIRWGNTSQYDIFWIAFERNGDFSHLANEGYCLEFRARAEKPVKFDIRFVNPENSASLPWRMRYSINEKNLPPDGKWHIIRIPLADMAEHGAWINATQTWLGPQGKFAWNNVRQMEFVSEEGDMKNCYIWFDSIKIVKP

SEQ ID NO: 107804 - protein, 163 aa, Unknown
  Obtained from environmental sample
  misc_feature (1)..(163): Xaa is any amino acid
MSLVMIYEHIINANKRFGTEPVDIVHSGFHCEPEMIQSNVIIAPLWRPELFSNYFDNINQDLDGIFKIWTLSKADLRITYIVTGMGASNVIDIVLALGCTPCKKIIFIGSVGALDTLIGIGDIVIPEYFICGDGACRYLTNKNITENDSLGEKTTRIKSFSNR

SEQ ID NO: 107805 - protein, 119 aa, Unknown
  Obtained from environmental sample
  misc_feature (1)..(119): Xaa is any amino acid
MGRKKKKVKTPPPLFFFLLGGGGKKKPFFFFFWGGNFFPPPQKKRGGGGGPPPPLLFFFFGRKKTLPPGGGKKNNPPPLLWAPNGGGGAFWGFFFSPXGMVXILRYSGIYGKRRSSRII

SEQ ID NO: 107806 - protein, 160 aa, Unknown
  Obtained from environmental sample
  misc_feature (1)..(160): Xaa is any amino acid
MVLGASVGLGDSARTARRYFLGGSENWFNYDVNAENYNSNIGYSYYSSLVSPLRGWNYFDLAGDRVLLMNSEFRFPFIREVSTVWPIPMQIRYINGALFIDAGYAWTGGEALPPRMAGGYGFGMRANLGIFVLRYDRGWPTDFKGLSRGPINYFSLGAEF

SEQ ID NO: 107807 - protein, 146 aa, Unknown
  Obtained from environmental sample
  misc_feature (1)..(146): Xaa is any amino acid
MEILRRVGVRYVHQVVYGHDPQNHPGGVHHRQREVVVLLDHLHSLLLALRGGYRDEVVVHDLLYLLLRVGHYELAQGDVVYQPPRGVGDVDHVDRLAVAPEGADVLHSLPHRPPLLDVYDVRRHDPAHAALRVAQELAGELQILRA

SEQ ID NO: 107808 - protein, 156 aa, Unknown
  Obtained from environmental sample
  misc_feature (1)..(156): Xaa is any amino acid
MQHPQQPHLGGHRHCGHFVQKNGAFVSLAELARGVLPRVGESAFGVTKQLRLYEVFGYGPAVDGYKGSIRLCTHSVDRLGNNLFASTAFASEQNSGLCGCGSLGLGKHVLHGLGQNDKTNTQRLGARHGRLDLRGRAHTWTRRLLAYYAPADTGQL

SEQ ID NO: 107809 - protein, 298 aa, Unknown
  Obtained from environmental sample
  misc_feature (1)..(298): Xaa is any amino acid
MPTLPPDQLEQIARMVMTQRLTQELNAAANIAGINYEKEKSVFLANAGQSDHTRRGYAAALSRLDAWASRHNVNALELTPAQADDFIYSLRGDISEKTGRANSPATVRLTTAAVSSFYTFLHRRHSAIDNPFRGTKARPKETAVRGLAVPTAKEIKTMLKELPEFEATAAAIMAGLGIRAGALPTMEKRGERYRVTSKGKDFFIDLTPDMIKRIGAAGLDIKKPFSGRTANSIELKVSYHIKKLHQAGKMAAAYSCHDLRHFAAVREYSKDHDIKRVRDFLHHSSISITERYLRSPGR

SEQ ID NO: 107810 - protein, 310 aa, Unknown
  Obtained from environmental sample
  misc_feature (1)..(310): Xaa is any amino acid
MGGFFIIGQRRKLMKITNKYNLPEGFVKAVSIEKHNAEGSLSATTLIHGIKEIILTDRYWDLLEDDVSDRIWAIWGQAVHSLMESEGENEFTEQEMDYKVGGITVTGKIDSYDMKHGVINDYKTAPVIKVKLGNFTEWYLQGMIYAWLLTKNNFPARHCRFIALLKDHSKPEVLRDSQYPKSPVYLYEFPVTKQGLFKIGVYIKDKVGEHQRCIALDDDAIPPCTPEERWERPPVFAVMKSGQKRAVRLFKMREEADLLASVKGESHYIEYRKGESVKCSSYCLCKHYCNFYQDYVLSSSNEAECEQSAA

SEQ ID NO: 107811 - protein, 283 aa, Unknown
  Obtained from environmental sample
  misc_feature (1)..(283): Xaa is any amino acid
MQADGLVYRVGYARREDRFWDELVDAGLFGRKLDERPICGGEYDDGGLLSLGHSLFNLLRKFKPVHLRHLPVHEVDVVEAVFVYKGERLCAARGGVAVLRAQTLGYLFEVGQYVGVVVHGQNAHVAPVYLACLMVGFRRLSVLQERGKVECGTLAQLGLDSHLAAHHLHDILGDGKPQTRAAVLAGGVAVGLLKRAEEYLLLLFAYADARVRYLHPHDAAVLFALYEARMHGYATPLRSELNGVAQKVHNDLRQTQIVSYKRGGYGVVVVHLEALPLLVHAES

SEQ ID NO: 107812 - protein, 324 aa, Unknown
  Obtained from environmental sample
  misc_feature (1)..(324): Xaa is any amino acid
MTTTTALPPGVAGEFEVSPSLADLCRDVVSLRVPYDDVAEQVEDAAYFEYERGGLEHVLDLLGGVAHFLEGLRNKSEEVSRDLAQVYLLIGQIYQYAEMFEESIAWIEKSIVVDDMYPVSYHSLALAFKSIGDESMSIKSLEXEIRVAPGNYYSYLLLSDLYEKNEIFARFEDVLRRLLERDPDNIQGLHRLIRHCERAEISADVDLLRRRLLAQSAGLSRIEAVIRAYHLSRSGLKREAVEFLEAWSEGAPDVSINHLAIAHICGQLSQHAKKRRELSLFRMKNRAREEVMEIKLAEFASVFGDEAAEKIRKSLRIAVTDIDI

SEQ ID NO: 107813 - protein, 153 aa, Unknown
  Obtained from environmental sample
  misc_feature (1)..(153): Xaa is any amino acid
MERLKEKAYEIIKRPIESISKFEIEMIKYDTNYNYEQLRRAYEYDTNEFLFLYYTYLENIIYSFGKYKGITLPRRTKMYQYIFNDEYYVNKDLNKINDNIFLELLKRCMKNGDNAIMYKNITELKNYLMNLVGGFNKDGWKIRCEISGNSYEK

SEQ ID NO: 107814 - protein, 251 aa, Unknown
  Obtained from environmental sample
  DOMAIN (61)...(246): Glycosyl hydrolases family 16
  misc_feature (1)..(251): Xaa is any amino acid
MIKSEYLKQYFRIQKKYTAAFAEMERWKTVFHDEFNLGALNPVWDTKPYWSTVMFDKNYSHNAEEHCLSEGQNIQLASDVVQIVTRREAATGMAWDEKLGFIPRTFDYTSGMLSTAQHLEMKYGRFEVKLCFPNVKNIYSVCWLGTGHSSPTIGVAHYCNKQLVMGAYTTNKTDKITKKLKLRNNAFYIFQLERTASTLTWYINGKKYFECANPSTKPLYIGLTAGVLGSTKDRQLPAAFECAYVKVEEKS

SEQ ID NO: 107815 - protein, 126 aa, Unknown
  Obtained from environmental sample
  misc_feature (1)..(126): Xaa is any amino acid
MVLEPTFTLLXQWVNXQELKLAECILRRIKILLYQRGIIFLKGVTMFDKKYSVSFDEDNLLLCSEGQAVYAQPLSDYPRLNGATSEQRAKWKLSNIGIHWEEIDEDVSFESFFYEKDDPLVVKARM

SEQ ID NO: 107816 - protein, 219 aa, Unknown
  Obtained from environmental sample
  misc_feature (1)..(219): Xaa is any amino acid
MKYIKSNASLEQSDETAALISFFDFVDRMLFFRNLDDRNYAGYEIGGHSLFDEIVGKNHFDDFKSFLTNAEVPANIISVKMGSQTRFFFKYETMRKRNPLIDFFENCSTGMKSLTVLFYWLQNAMFGEISPSFIFIDEFDAFYHQRLSEYVINVIKKINDCQFILTTHDTGVMSNDIMRPDCLFLMHKDKIESLSSLTDKELRFAHNIEKMYRAGAFDE

SEQ ID NO: 107817 - protein, 147 aa, Unknown
  Obtained from environmental sample
  misc_feature (1)..(147): Xaa is any amino acid
MMSYQISKYQWIEGKGPTVEGKYKINLTPDPNREAKVVKTKNGTALSRNKNGGIEKIPEDFKERWGNKRARLEIVNVSKPKYEKRTERERDLKSFYFHDSIKTYTSGCTEVDREFFEALEQYRNEGNKEIYVKIEYPNQEHKTGRFN

SEQ ID NO: 107818 - protein, 217 aa, Unknown
  Obtained from environmental sample
  misc_feature (1)..(217): Xaa is any amino acid
MPIVFFGTGVGIRDRLGLLRITVPVEKEILWFIVPASDAILVEKIIIPRAGLDIPGRGFLYTMYIHAPVVNLRVRHGKRAHAATMEQIIAALDEVRGSSDWRRFGSRKHDSAGKNRSSSTRALFFIGEAEDVEIFRKVAIESGARGATLNELEMRSYTAQTQEEAKASHSRLLCDIVITRAVEEKIMEHLANTNLLDGNRHCGLKTFDVEMPSIIRK

SEQ ID NO: 107819 - protein, 205 aa, Unknown
  Obtained from environmental sample
  misc_feature (1)..(205): Xaa is any amino acid
MAVDCIQAPDGTTRKFMSDKPDRRVFVPAASKNPEAALRYLNWLSIFENFNFLQLGNVGVTYEMVNGIPKSMPAPTGSPWIMNSAQNIDYTMPVNGIELLDNDKNARVLALSYGDTPPETIVNAMATSTANGRVSPAFSTAQTNIGTYGQVLMDKTDALLAQAITAPVANFDRIWDAGYADWLASGGQAVIDEKTRLAATNPAWR

SEQ ID NO: 107820 - protein, 262 aa, Unknown
  Obtained from environmental sample
  misc_feature (1)..(262): Xaa is any amino acid
MQGMVRVLRVGVRYEGQQPLAFPGAVLDGAERDPLQVVQRLVQLLQRHAKVQRHLLVLRGPAVAHGQHMVGVLDVLLLLPQRARHPVQVAEAVQDRPPYPWLREGLELRAPGGVEVPDRGQXAHYPVAYQVVQLHALRHAVGYAQRDVLDQRQALLDHRLHFRGQRPRADLVFGGLRWVDGRPQLLGEALRRPPRVAAFYVQGMRGPAPPRNGYPLLFGGKTPPNPYPPPVLGGGMWFFKNPGAPQEGRPPKFFSPPKKGVF

SEQ ID NO: 107821 - protein, 136 aa, Unknown
  Obtained from environmental sample
  misc_feature (1)..(136): Xaa is any amino acid
MLTLKAPAAIKRMWSVLTGPHFVFTVAPSTMGRMSRCTPSRETSGPPPRSPFTAILSISSIKTIPVSSTRCRASSLTLSLSISFSDSSLISISLARLTVTTFFFLFPPKKPAIPERLASISSMPPPIISIAGNWGF

SEQ ID NO: 107822 - protein, 137 aa, Unknown
  Obtained from environmental sample
  misc_feature (1)..(137): Xaa is any amino acid
MERGRFAVNQLKKILVGNYYKSINKLPQFFDPFFGFLHFRLALKLKGLCNHADGQRSVIAGDLGDYRGGSGAGAATHAGGDKHHVGAARDVADTLLILFGGILPDGRLAAGSPSARQPGADLQFVIGFALSEVLLPR

SEQ ID NO: 107823 - protein, 118 aa, Unknown
  Obtained from environmental sample
  misc_feature (1)..(118): Xaa is any amino acid
MRVLPEFRGGGFAESDCLCRDNVGERSAHCQRTTLVQGFRKLACGEYDSGAGTAQGFMRSACYNMRPGHRIIFARKNLARDKTRKVSHVYHEHRAYFISDFPHALKIYFPRVGGIARQ

SEQ ID NO: 107824 - protein, 200 aa, Unknown
  Obtained from environmental sample
  misc_feature (1)..(200): Xaa is any amino acid
MPVIPQILXVWKENEIMRTRILSKEQSKKRASKDLWTSEFAWLAGLHIYGVFDAYGIWKNNQEHNTETHSAASAVWRAALIPGWGQIYNHEYGKAGLLYMGLLGSAVSYHSRQKMVEYHLMNLRRAKEAEDDEAIGIAEEDVLFFRKKRNQYIWSITLFYLYSLADAAVDAMLHDFDSPAYFVMHPTFNKGVNVEAGFYF

SEQ ID NO: 107825 - protein, 238 aa, Unknown
  Obtained from environmental sample
  misc_feature (1)..(238): Xaa is any amino acid
MRGRPVRDYLPCGYFIAGINNGALVITCVLIGSLELYQFINIVAVIIKRYLRRRFRAARPFRLYDYLLRCYAKNCSVSAGFYKHAGIVRAFSFHSRAYARRFRKNKGNRLTLHVGTHQSAVSVVMFKERNQRSGYRNDLFGRDVHVLDVFRLAGCVIALAPAGNLIVGESAVVVHFGGSLRDKIAILVNGGKIFNVICRDPFVYFTVRGFQKAEFVNAGIVRKRNNKADFGPQGSSSP

SEQ ID NO: 107826 - protein, 161 aa, Unknown
  Obtained from environmental sample
  misc_feature (1)..(161): Xaa is any amino acid
MHRHDAYARAVFRRQGAEQNRRGHDYRQPQSAPVQRIQNLVRHKHALRRRDSGTPPRLRRGRLPSGQRSREPCGHHARVCGSHLFPASSQTPHEGRGGRRQRRGRTGLRGGAHPAGGRGDSPLLRTGRTLPQPSSRPHHRGQYAGPHRRRTGGRRGSRLRP

SEQ ID NO: 107827 - protein, 253 aa, Unknown
  Obtained from environmental sample
  misc_feature (1)..(253): Xaa is any amino acid
MNKSIEIPFIIEKRRIIVFAIINGIKGKYMWDTGAAISLLNNDCENKLVENEYIHYGISNYSKKQKLYELNKIHFEKNIIKSKSLTGKTPNIIKKILMPINADGILGLHIFSGYWCELSFSKQKIILHKNKPKEYVKRKKLKCTDQGLFIYSKINCKKYELEIDTGCPYSIKIKDPYFPRKKAIKMFTSSPNYKGFYHKIPANINLFDNKLNNRYVTYTSNKKDYGFIGIEYLKNYDFLFDLNNSINNGKYLL

SEQ ID NO: 107828 - protein, 250 aa, Unknown
  Obtained from environmental sample
  misc_feature (1)..(250): Xaa is any amino acid
MVFGHTAIIGSRGFADIDADVNAGSDINTDVGINIDKDGEPNGAAKRGLIRELFILLESYQLEYLFSFARAFSKLNLTGSCMGNNILITKEAYTACGGQRGVGYTIVEDRALLGLVRKRGFKADAQEPFTVTAWTYPSQSKRQFAGQMLRWARGGLRPGGGLFFAGLLLFTQNILLLLSMMGILPTLLVFLCAVNFILTWAFLSISFHKSGTRAPKILFPAYYIFMMAETAVFLPLMLFKGRIEWKGRKV

SEQ ID NO: 107829 - protein, 136 aa, Unknown
  Obtained from environmental sample
  misc_feature (1)..(136): Xaa is any amino acid
MTASNSDWILRIIPAGRLTLKFPDDIRNIIKRKYQNKHRDWLKEIVLKNNSQVLWPLEINLDIPVEQDAFFQQDAVKAWISAWKSWQGKGDIVWTERHWRSLGIQTVPQKLILNEPEDVVSWIGEAETWSRVVERY

SEQ ID NO: 107830 - protein, 443 aa, Unknown
  Obtained from environmental sample
  misc_feature (1)..(443): Xaa is any amino acid
MYCYYPLDKGWPARASTLAEPGKAGFAWNYAYDDYFPYQGGIGAVGDSTDKEPFASMRDVRRHGQDVILTLTIDCAVSDEHLVQIAKELIPFGRLMLRINHEATGTWFAFNKRYTYQQVADFYVRFHKIVKQHAPHIRTILCIGAAHKTESGKLDYEDEFVGAIAEADMWSSDTYLSLHWGWPFDIAEPGGKSHKRSTNNDILEGLRFDFERFAARAGKRKPFVLSEINADGDVNGPFEQAEQLVDFYRRIPKEAPDISGITYYQFRDRGRLGLXMEDPNNSNVGIAQPFSEDYKKIMADSYHSPKMKKGEELAFPAKLRWDSSEDVTGITIPIDFEGNPVFCEVMFTNTEDVEKLNAMMEINGKWFYKKPGVKSVDLAPAFFKNRLNGKQRLEFRLFAPPASGMNDPSQGEDWRINYYYTLNTIPEFRIRYEPTIRIDMEIL

SEQ ID NO: 107831 - protein, 190 aa, Unknown
  Obtained from environmental sample
  misc_feature (1)..(190): Xaa is any amino acid
MRRLDELGQVLRVVREVGVHLENVLVAAFQRPLETGDVGAPEPLLGGAVEHEKALYPSGGHLLDSGARSVGGGVVHNEDVRSRQRLFDLRDDQRDVLALVVGGDYYKYFGVVHILKIIFAEERGAFYYIMLSLNLQMELCEWPQYWTESLSLRRPRRLYRNGLAGSKRLRGVFRALPQYLSATTRPPPHT

SEQ ID NO: 107832 - protein, 210 aa, Unknown
  Obtained from environmental sample
  misc_feature (1)..(210): Xaa is any amino acid
MRQNAAFALNGLQQKTGGRFRVQGFFQRVDVPALHVHKALGKGAEMLVEIVLAGGGKGGYRPAVKAAPQRYDCVPAGAVLRKRIFPGNLAGPFVGLGPRIGKEDLFHPRACTGSDELFGKGPGYVAKEIVAGVVELRGLIRDRLDQWRISVAQAIYRDAGTEVQVFLPVDIRNPGPIPFREDHRQPVVCVHKGVVHKSFLILSLYPCLRR

SEQ ID NO: 107833 - protein, 106 aa, Unknown
  Obtained from environmental sample
  misc_feature (1)..(106): Xaa is any amino acid
MKGYEIFIYLIKEYVKSMDRGSAIKRAIGDCIRQDVLRDFLKEHGSEVHNMLLSGWNLDDAKRVWQKEAREDGREERDNEILDLIEKGYTAADIKNHLRKQTCSFV

SEQ ID NO: 107834 - protein, 178 aa, Unknown
  Obtained from environmental sample
  misc_feature (1)..(178): Xaa is any amino acid
MILPSQYYEESLYPLQDGVMNILQHSGTNFFLTGGTALSRAYYNHRYSDDLDFFVNQSQTYDDQLNKVLALLQENGYNWDTNNEYTRAKDFTTLKVRKDSDTLLKLDFVNDLVPHYGEIIETQLFYRTDSIRNMLSNKLSAIFRYAAKDMADIREIALHETVDWPTVINEARNKEAGL

SEQ ID NO: 107835 - protein, 113 aa, Unknown
  Obtained from environmental sample
  misc_feature (1)..(113): Xaa is any amino acid
MQNHCIETWLLGNRKIFVHNPQDEDLKKYISHYNVNENDPEQMGKYPNINTTSQFHVKYLKRLLREKNISYTKHNPSDTAEPHYLEQLIKRVQETSDLKSFKNFLETIKKFLY

SEQ ID NO: 107836 - protein, 163 aa, Unknown
  Obtained from environmental sample
  misc_feature (1)..(163): Xaa is any amino acid
MRGVSCRRDNFHRRHRRVFIALRGARGRARGEERQSRVYLQQPLPLHRRNQENLRPAAPREAAGGRRTNHRAHRRAWGRSAQYRRDGKIPRKTPIRPLRNTGVRRDKRHPLIANIRRGGLRRPLSVKEELGDDTRLRRRKPRQAHRPGATARRKREIGIEQRQ

SEQ ID NO: 107837 - protein, 204 aa, Unknown
  Obtained from environmental sample
  misc_feature (1)..(204): Xaa is any amino acid
MGRDDLSSVRITEVEGGMNREIYSIKGNPRHLYKAPGNCLTLAFRLRLSPTNKLSCGIQPANIRLINRRVKFPFHFHLFIFVYFKKIKKKWFLFLTERHIISEVPTSNKQILNEYLILKEQYDLLVYKRFARSAEQLLADEKQQLLFAEEAEQPETNEEKPLGLQAVKSFTRNKGGRKPIGPSLERRPRVIDIPESEKTCACGA

SEQ ID NO: 107838 - protein, 282 aa, Unknown
  Obtained from environmental sample
  misc_feature (1)..(282): Xaa is any amino acid
MPTSPALHGVQLGRVRRRQHHPDVRRHSQVGGHAPPRPVHDEDAPAAAEVLRHLVQEDLHEGGADPGQDEGEALARGGAHGAVGVEVPVARPHNRHLAPAAPRPPPAEGGPRRRRTRPRRGRRPLSPAFFLKSPCAAASAWWRLGLGASCLQPSLRSHTQRALPLIPTPNSSLTAALSRPSVQWTCSPAAVRPPSSHAITAAFCAASSFEGLGLFGFGLRASRPPCLYSATQRRMVCAVTFMTLRPWPGGPSRRRRSPSASSPGPPRPPASGPRPRAPRAPA

SEQ ID NO: 107839 - protein, 195 aa, Unknown
  Obtained from environmental sample
  misc_feature (1)..(195): Xaa is any amino acid
MVLRGFMSKKRKLGPERRMKPVFLVFCEGETEETYINFLRQKYRLPVKVIPYITGLNISPKLIKSYIALEQIHRHDTIASFLMYDLDVEGISEKLAACKGSVSIASNPCIELWFLLHSVDQYAEITTSSCITALRNIPDWSNYKKSMFSDKQKQILWETRTTACERAKKLPEVGNPSSAVYKLIEAMEKQAAYGA

SEQ ID NO: 107840 - protein, 112 aa, Unknown
  Obtained from environmental sample
  misc_feature (1)..(112): Xaa is any amino acid
MSSPAASSPTATATPPAPKSLQRRIILPTSGSRKSRCILRSVGALPFCTSAPHVCMDSSVCSFDDPVAPPHPSRPVLPPRSTTTSPGTGSRRATCDFGTAPTTAPISIRLAM

SEQ ID NO: 107841 - protein, 136 aa, Unknown
  Obtained from environmental sample
  misc_feature (1)..(136): Xaa is any amino acid
MNCRKYYKGIEPFHHCGGGAVRKNRHHPKHQAEAVEERHRKAHDVFVAKTLVVSDPKAVVQDVTVGEHDPLREAGGSAGILHVHHIVAIKRSFYQPEFLFVAVLPQKEYLAERVHSPVFLLAYVDHVFQKREFFGA

SEQ ID NO: 107842 - protein, 221 aa, Unknown
  Obtained from environmental sample
  misc_feature (1)..(221): Xaa is any amino acid
MRVSDTLTAVQIWFNPTMEDMSRAYFNLAVWKGAASDGSPNASPIYVGGRIEPIYNETTGYVEFPLDTFIVLDTGSFFIGFQQQSDAYLNIGFDQNNNALNCMFYHNILEKEWLPVFYYGSVMMRPVFGTHHTPPSPSFCEKDVAPNKISIFPNPSDGTVFVETPENSVNSYEIYDLSGRRLEQKTCRSTQFSISLPERSGVYILLLNTEKGLVSKKVVRQ

SEQ ID NO: 107843 - protein, 177 aa, Unknown
  Obtained from environmental sample
  misc_feature (1)..(177): Xaa is any amino acid
MDAVTIGPAFSVPTSLAFCILHFVPFPTNPRTLSAISSAPSPSSFSSLSVLPCCTRWSATPHLSRGTVVMPASAKHSATAEPKPPGRQPSSSVTTRPVFADWAQIRSVSSGLANLAFTTAHETPSLSSLAAAASAGWTIVPSATSAASLPSRSSSPLPMGIGVKEPSRGTPTLAPLG

SEQ ID NO: 107844 - protein, 117 aa, Unknown
  Obtained from environmental sample
  DOMAIN (11)...(66): Helix-turn-helix
  misc_feature (1)..(117): Xaa is any amino acid
MLMDTSINDRLKQARNALNLSQKQFAAGIFLKGSGYIGDIEIYRHEVNERIIELVSSIYGVNKAWLKTGNGKMFDGTKLDKQLNEMNIYFNQLNPHFKNYVLSQIKQLIKLQNIKDT

SEQ ID NO: 107845 - protein, 191 aa, Unknown
  Obtained from environmental sample
  misc_feature (1)..(191): Xaa is any amino acid
MVAVGGCALGQGPVARRRLDRRSQLPDAKHRRRHRLRREKRPVQPDKRRLCPARRRVGRRLRREIQSVREDDPRLPHILHSPYALPPVNGRPNRLRGTIRQKRRRSAAKQVLRRRQHHGQGLSGRQARGSAEQRSAAGKFLHIPKPRRRPRPHVLVDTRRLVPNMVQRCGVHRRRKRVAELFRYSVCRKSI

SEQ ID NO: 107846 - protein, 139 aa, Unknown
  Obtained from environmental sample
  misc_feature (1)..(139): Xaa is any amino acid
MLYRRLLLAEHLRNLLFDLAYLRGDFHTRQPLPRPGFVDDVYRLVGQETIRYVPLGELDRHGDRFLRICDLVVLLVVVAQAGEYLYRFVYVWRVDHYRLEAPRQGAVLLYVFAVLVERRGAYALYFAPGEGGLEDVRGV

SEQ ID NO: 107847 - protein, 204 aa, Unknown
  Obtained from environmental sample
  misc_feature (1)..(204): Xaa is any amino acid
MALRRFGEHGFGNGQRTVAAGEEDTVRLRRDEPAAEDNVPVQRGDRVRIRGSGARGQRRGPGAESDRRDGEHRLQVRPAGAGRGRDAGDTAAARVKREDENGYDEVREQLPGADGEDRIPRRGGGELRVQLGRADKQSNGKPQRDGVPVREEHRVRRIRAEGVHRIRQRGKDKVQLRPVPQVAVDDTDGEPGNGAPVPGHKVYV

SEQ ID NO: 107848 - protein, 183 aa, Unknown
  Obtained from environmental sample
  misc_feature (1)..(183): Xaa is any amino acid
MPGGTLLISRAVNWFPQFKERLEAFGFPDVHVTAVEKDGLNMLIDELNPDYVLIDSNFYDCGTPYMVGQMLGVFPKLNIAVINTGTFPDAIAAWFVFHGVKFYVKWLDGKEEFHHGLQCFLEGKRYIAPDLQNILDGMEWPVIPLKATRRHKEILLMLCCGFSIQGIQDRLHVFKATVEYHIR

SEQ ID NO: 107849 - protein, 154 aa, Unknown
  Obtained from environmental sample
  misc_feature (1)..(154): Xaa is any amino acid
MLAGKSAREAVYMKKMRFWGFIFLLAAAVSFIGCLLEELMDEGGDTFVPVKSITGVPTTGFVGTELILSGKGVPSSATNRTITKWTIKDADTTGITAIVNGNTVTATAAGTLTVTATIANGKTETTSYKQDFDIEFSNKFVPVTGIISVPTEGI

SEQ ID NO: 107850 - protein, 135 aa, Unknown
  Obtained from environmental sample
  DOMAIN (18)...(72): Helix-turn-helix
  misc_feature (1)..(135): Xaa is any amino acid
MARCDSGRTMENSINERLKAIRTTLKLNQRDFSKSIFLRQGSYARIEQGKIQLNERIMELVCSKFNVNKAYLKDGKKPMFNGDPPDVKLDQLNQVFNELNGLFQDYLILQAKELLRVQNQQGEENKPFHKSKEPK

SEQ ID NO: 107851 - protein, 152 aa, Unknown
  Obtained from environmental sample
  misc_feature (1)..(152): Xaa is any amino acid
MFFNSWNISRLHIDFVDYRHYLKIVFQRKVHVRQSLRLHALSRVHQEQSALAGINRSAYLVTKINVSGRVYQIECVLVTVLRRVGQSNRLAFDSDASFPLNIHIIEYLILEIAVVDKVGFLNEAVGKGRLAMIDVRDNAKVTDKLSLCHVSL

SEQ ID NO: 107852 - protein, 114 aa, Unknown
  Obtained from environmental sample
  misc_feature (1)..(114): Xaa is any amino acid
MPYTSLAIFPIPPNCIPLTFSETFTIPPNCMPYTSLAIFPIPPNCIPLTFSETRLNTPPNYMPFTSLAIFPIPPNCIPLTFSETLTIPPNSTPFTSPVLLPIPPNCTPVISFFT

SEQ ID NO: 107853 - protein, 139 aa, Unknown
  Obtained from environmental sample
  misc_feature (1)..(139): Xaa is any amino acid
MGENLVHEIELCIEGNARLALQLRKYLRIVRRVDKHRNVLVVFCGGAKHSGPADIDIFHRVMKCHVWLFYCRLEGIEVYYYYIDCVYAKLFELLHVFGVCAHCKKPRVNVRVKGLYPSVKALGKARYVGNADYRKTCRL

SEQ ID NO: 107854 - protein, 241 aa, Unknown
  Obtained from environmental sample
  misc_feature (1)..(241): Xaa is any amino acid
MAELSADSGVTKFPPGPSRFSVIVQMRSIHPQHLRRIRHIAYKIDHGVVTERLRDAQRQPGHGADVVFKLARPRPLYRPVPGVVDTRRHLVGHQLAAHIKQLQRQNANVVKAFQQSARQPLRDRLHRIAQAANRVAENAAGVRVLTHRIETRLAVAASRRYDAYLPCKGDECLENARRAARQSPRAINISIGSYDRLTLTVVPKRARLQHRGQSDLTYRRFQSVKTIHSEKFGSGNAKINK

SEQ ID NO: 107855 - protein, 221 aa, Unknown
  Obtained from environmental sample
  misc_feature (1)..(221): Xaa is any amino acid
MAILRLPMGTGNDGADSPNLADALMLLIKPSRIEFNPALRLVTAPGGQAAKNHPSCLAFNILSVGLDAFVTHMTNKMKGKLPGDSYKLWVDIASLLYDRLYTVDFLDVKADGGAITLREKLLLLAVGASGHRTYGAQKKILPDDRNVCALKQMPLLRKLALKDLFSTGKHIDKPEAILFNARRVEFSGSVPILAQMDGEAILLQPEDFPAAIELTEPVIPC

SEQ ID NO: 107856 - protein, 250 aa, Unknown
  Obtained from environmental sample
  misc_feature (1)..(250): Xaa is any amino acid
MARRYTAKTWVSLPAGTPSELVIYAAAFVPFGAENVQTSKLNNTWSKSYVRSATCHVCGNGYLPFMPGKLDNLRFTPVIFSVENIVGNAFYAEHFGKFFRFFHRYCSHQNGLPFCMPVFYICDNSLPLCIRCFINLVLHIVADTGFVRGYNPCWHIIDFQKFRGFGFCGSSHAGEFLVHTEKVLESYGGKGLVLFANLHIFLGFNGLVNAFRIAASFHQATCIFVNYHNFAIPYNVIHVFCKNTLSLDRL

SEQ ID NO: 107857 - protein, 129 aa, Unknown
  Obtained from environmental sample
  DOMAIN (9)...(119): PilZ domain
  misc_feature (1)..(129): Xaa is any amino acid
MADEVGRYDNRNRVRHELVYYLKVTDRQTRLELGRLGDIHLEGMLLFTPEPLPEQTVYDLSLELPKVLALSEGYPELLFQAQTLWNRPGPGLSNYCYNGFRFLGLDTPTQRVIRKLTEIFAMPGRAPKS

SEQ ID NO: 107858 - protein, 168 aa, Unknown
  Obtained from environmental sample
  misc_feature (1)..(168): Xaa is any amino acid
MIVSGYDDTKGAFRARNSWGDDWGDNGSIWVDYKFFLTEFCFAAFVAENPKTSSSTAAKQSLSGGINDSGTVIYMYYNAFNINENGIGYDTMPTMPKITGQYYLIVYASDNDFYFITANNGKPLVFINGIMQNEPVQNEKAKSVQELGGHPNSYTLEEIKQVLRNKKR

SEQ ID NO: 107859 - protein, 209 aa, Unknown
  Obtained from environmental sample
  misc_feature (1)..(209): Xaa is any amino acid
MFAEPALAWGFCPWAGPSCWLGRAHAPARSTPESPKSRVSSSSSKHIPIRCVFPERPDCCLDLYVHGPVVPRGTCGIQRAHQLGQTLRRLQTNDADALQRHPSLQRQHMLQRVNRAQQLSGGYGAHADVVFLAGARGYGIHAGGVGYALHLAHQRGAGDVRHHEAALQAAVPAEEGRQVRVRRIDQALLSALGDACQVTGGYGQHVTGE

SEQ ID NO: 107860 - protein, 264 aa, Unknown
  Obtained from environmental sample
  misc_feature (1)..(264): Xaa is any amino acid
MAFGVELFHVACAAMDLNSVIGNLVSHFSGVTFNQRSEEPGVFRVFLFIFHYLAFVFRVLFGIILQRFLQVNETGGFVEEAAPRFDGDLHFREHFKNRREIAHRRAELDALCGVKVGFTVGRFRDTHRLGSHAETGVVHEPQGVLGEASLSLAQKLCGRVVELQLASRGAVDAQFVFKPSDGHFIVALVNEKRKPACAFSLLLAAGKYQADCPAAVGDKALDPIQPPLAVTAKYGFSVHRLKIAPRIRFGENHRGIPFARTEFR

SEQ ID NO: 107861 - protein, 156 aa, Unknown
  Obtained from environmental sample
  misc_feature (1)..(156): Xaa is any amino acid
MVRGSGVAELPDPQMRDRPRRFRSDNAVGISGAAPREPDMRPRVFELGRRRVLAGLAKRDKRVDIPAPAPLGRQDGRVRAGIPIGRLRAGTEGAKPDGQGTAARAIERLGVYNENRDDGGVRDAQGQRAHSELFETVRPSEGTMYRRVFCGAFRVA

SEQ ID NO: 107862 - protein, 107 aa, Unknown
  Obtained from environmental sample
  misc_feature (1)..(107): Xaa is any amino acid
MDFNSAARRGNRILDLRGFFLGNIFLEGLGHAFNKVFGFFKAKAGDRPDFLDNRDFLGFLESLKNDGKLGFFLSRRRGSRPAAAANRYRHRGRRGHAEFLFHHFNQF

SEQ ID NO: 107863 - protein, 163 aa, Unknown
  Obtained from environmental sample
  misc_feature (1)..(163): Xaa is any amino acid
MFSSIVKDRKIQSEAAQFLNKHVERFGNARRRGGFALYNCLVNLSASGHIVRLDCQKFLQCICGAVRFQRPNFHFAQPLSAELRLSAQRLLGNKRVGTGRARVHFVIDKMVQFKEVNYSAENRIYKRFAGSAVAQNGFACYGQSGFFKFFFYLLRRGRLEYGG

SEQ ID NO: 107864 - protein, 113 aa, Unknown
  Obtained from environmental sample
  misc_feature (1)..(113): Xaa is any amino acid
MLQQAMNSLVDDAYAPGFPIRTFTGQSILTARRNLSQSFTSFIASDCQGIHQTPFHTFFFMLEKQWGPKSLISSAELSRRRPGPTAYYSITSQKSLKAVVIKLILCILNYPSP

SEQ ID NO: 107865 - protein, 247 aa, Unknown
  Obtained from environmental sample
  misc_feature (1)..(247): Xaa is any amino acid
MVRNQILPFFGKTALDKISSEDINKWLLGFKDRTFADDSGKEIKKSYKNTYANTVFGTFWLMLNEAVNRKIIKANPAAPVKKLKNDRKPIEIITPAEVRLLFPQNWKKIWDNDRISYLGNKLAACTGMRAGEILGLRSEYVYDEYIHVCAQYDEYGYRPTKTKEKRNIPIAPVVLDEIRQLALENNNGYVFSLDGGATPVTRKLLYNKFHRALNKIGISQKEVKRRGLSMHSWRHFFNTTLQMANVA

SEQ ID NO: 107866 - protein, 266 aa, Unknown
  Obtained from environmental sample
  SIGNAL (1)...(40)
  misc_feature (1)..(266): Xaa is any amino acid
MALTYKKKVLLLSSLVAVLAVIYILTFVLDPESRSSAAFAWLDPSLFDMADGIEIYGPEGMTVLRRRNAIWFVSGDSGLFPAKQERVDDLFDLLSRKANYPVRASSSEGIARLALTEENAFRITVRGGAGLPLLDLLIGSADALGREVYLRRAPWNQIYSAEDNFSYFINLKTNSWYDLRLFAEASVDSIQQVEVSFPDEAYIFRRSGRGWIIPGKENALDANRVEAFLKRLLETEADSFAVSAPETVEGRITIQLGTAVQGPRPI

SEQ ID NO: 107867 - protein, 622 aa, Unknown
  Obtained from environmental sample
  DOMAIN (54)...(420): Glycosyl hydrolase family 57
  misc_feature (1)..(622): Xaa is any amino acid
MQVEGCKKADWRGSGGGDWVKALSEVKVSFPKTAVKKTARVSVGDSRGVKIFFGIHKHMHQPYYRAADTAYWDGEKDGIFGSRAGNYTQFLKDAVDQYVGGGLPRAGLSTSWSGSLIEQLNRCAAEGLCGGVFGSWSNALREAAQYGTRSGAKRMAFSDFGFFHPLMALVPGRDIVTQIEMHRKIIRDVFSVETSRTLFPPETAFHVRMIPWLNKAGVKAVIYDSVHRYRACKDYPYAGKEEGMLPPNAAEQENAAIGGWMRLSNIWAPSHINPSMLRPEYIKYEDVDGTVHKIVGVPAERYIGNEDARGGYGALQYEHVLGQIYEHIAQTGSFDPAHPPFFLLHSDGDNHGGGADSYYRHNTGRLVEWLKNDGRFELCTVDDYLKDFPPDPNTAVHVEPGSWAGADNGDPQFRKWFSMYDQPYSPDLNSWSVLTALQNCIYTVQDAGNGGGDIDRAVRLLLTAETSCYWYWTGQEIWDRQVTDAANAAMSIIRSDLDKVISSGKDKTPPVIFPPWVTPENPGGKTWGQGCLKDAEKVGTVHTFVYDASGLSSVVLILRVNGKEERITMNGGAYPSRTSPTVTGEYYTAKLPQGAGDISYYIEAVDKKGNKAVSSLERIFLA

SEQ ID NO: 107868 - protein, 110 aa, Unknown
  Obtained from environmental sample
  misc_feature (1)..(110): Xaa is any amino acid
MTEGLCHILRDPDAAVGVLNRLFDHLRCVLRGFDAAHRQIAHLFGHNGEAFAALSGAGRFHGGVDGEQIGLEGDFVNRLDDLGGIVRRGLDMANRVDHAPHGCVAVVARQ

SEQ ID NO: 107869 - protein, 222 aa, Unknown
  Obtained from environmental sample
  misc_feature (1)..(222): Xaa is any amino acid
MACGHRHQTRPGRVLSVFGAVHIPRRLLYALRGRGNIRSLKIHYKREEVDLCLCRTKAKFSQSGNTRRLTLDPVEIEFSDLRLTVQTVYDFEAGTSAIKTIRKILNMSKPAEVEFDEYITACYGTTEYPEDMTCVTLTVKGAEGEKVINYNYKCREVKTACAVCASAEIGAINTRVDFEPSGDAEAYVREGYAFSPMFTLGLKKKISDGGEFVSWLRLKKAK

SEQ ID NO: 107870 - protein, 220 aa, Unknown
  Obtained from environmental sample
  misc_feature (1)..(220): Xaa is any amino acid
MPGIQEKKGKGFFFLYQCYDHLIRYYYLAASIGLGAAGGGFGNNLIISRIALEAVGGYDAIPPSPTEDAALISQIRREGKFSVRAIAMPDAAVETTAEKSWRAFISQALRWNNGGLFSPEPITRFNYNFLMLLISAGVLAIPFLPFFPGLWPMPLAVLITMIENTIGSFSAFRSRLPYGGPLVELGYLLALLFTPVFFTLMTIMGYCGIKIKWKGEQIPS

SEQ ID NO: 107871 - protein, 265 aa, Unknown
  Obtained from environmental sample
  misc_feature (1)..(265): Xaa is any amino acid
MTMEMNASVDGEDLKEIASSFFDEVYGIRTGVFLSALNRLVRAATLAADESEDILQWQKILVAIRRFTQNLDAAKAETADNLLHDSYNLFSETATRQQAHKRLQAEQKAALMRSVGHSIANAFDIPTLSQAIVKMFPKLEINDFSLSLYDKSTKEFLNSKPIITLNDGQKDAIPQDMFFPTSDLMPGGLKETQEPFHIIVQPLHFKNEQLGMAVFKDGPLTGYLYDILGEHLSGALQGALLMKKIQEQSITLEKANKELKRQTQR

SEQ ID NO: 107872 - protein, 228 aa, Unknown
  Obtained from environmental sample
  misc_feature (1)..(228): Xaa is any amino acid
MERAQPVHHARPVHRRSGAAHLHVLQHQPHRRAALPCWLWCHHGIRCAAATHPHPRHGDQLRINRPHCLYSVSMPDQIPDSVFDDDADVNAQFSAITSALADIDKPMPVGDTPLPSRIIGRTMGARDWSLTEEAEALEDAEYTFTPPDPGPVLTGTDRLVHVAWVAAIGIPVLAIVALILINAIPALRVPVFLGPLGALGFLAAVATLIWRMPDRRPNDDNSDIGAVV

SEQ ID NO: 107873 - protein, 201 aa, Unknown
  Obtained from environmental sample
  misc_feature (1)..(201): Xaa is any amino acid
MPACDRSGTGPRHDGVSGAGRQWQSMQWYQHVGLGLEIPRPSRRQPDHRRRFLCRHTLWRRRVHRRGRDDDPLRYRALDRALPETRCRRGGRRLRSGRGHAGAGERLAEPRDHPCHRCPRQSQGRRRQRQRGQRLLALGRQGPTAVAACRSHRDPARHHQAERHDRLWLRAAFLRRPARRAPAERVHTTFRPRSASISARS

SEQ ID NO: 107874 - protein, 146 aa, Unknown
  Obtained from environmental sample
  misc_feature (1)..(146): Xaa is any amino acid
MNVPGSFPGQAFAYQQQGHVGQRGQVAGRPHAAHAGYDRNHIAVQTLRQQADWLHADAGVGLQQAVYAGSHQCAGLRGGQRLAHTGGVASHQIKLQHRQLVGRYHHCGELAEAGVDAIDHPLFEQDAVNDGAVFLDLGQGRLVQRD

SEQ ID NO: 107875 - protein, 131 aa, Unknown
  Obtained from environmental sample
  misc_feature (1)..(131): Xaa is any amino acid
MGGGGGGKRKTTPPPPSFFFFFKKKRKKILFFFSFPKKKKKKKGPPPPQKEGAKKIKFFLFPPKKNISAPPRKKKFILGGGGKKKKKCGAPPPPPGENIFFLREGWVWPFFRKKKNKRRDNFFLLLKKALC

SEQ ID NO: 107876 - protein, 137 aa, Unknown
  Obtained from environmental sample
  misc_feature (1)..(137): Xaa is any amino acid
MPLFVPLCYVCNYRLPFCICGFVNLVLHIVSDARFVRGYNPSGHIVNFQKFRCLGFCRACHAGEFFVHTEKILEGYGCERLVFPANLHVFFCFNGLMNTLRITAAFHQATCVFVNYYNFSISNNIIHIFYKNIVSLY

SEQ ID NO: 107877 - protein, 275 aa, Unknown
  Obtained from environmental sample
  misc_feature (1)..(275): Xaa is any amino acid
MRVKKNGLYFRDNVXKCPVVVEFKYWDLRREDIGQILEYKARIFTSFNDEDEELFKIFGNKLYSPKLVLVVRRSDDYGRIACSLQNIELFEFGNIEKRIIEDIPFIKKVSDFSKSLKEYSPPITEGRNEYLQNNVYDVVEKLFENYGISEKWKNYRNANIGEWLNLKNIFLNRNILPEETVQVGIYEDIIEGKDMSVCVAYYTWVDNDIKIKEIKKKLDKLEKLLKTKTNLSDSIKNNVTYDEENQFEYWLICKYKYNVFYKYVEKIMDYNISNY

SEQ ID NO: 107878 - protein, 446 aa, Unknown
  Obtained from environmental sample
  SIGNAL (1)...(19)
  misc_feature (1)..(446): Xaa is any amino acid
MKSFFIFIHLLFLPIFCFAQLNDSITVTGRIPDAADAKLYQLQVGSYKIISNAETSYEKLRAASLNPSYEQYIDFTRVLIKGIKAADVPSYIEKIKRAGFPEVLIKIDTGNSVTARLPVSTAAQPAAVSREVGYRSVKVGESINLANIAGANTVTSWRSSTPSTISVGSNGVITGLNIGNGYISINENEYISVAVVPAENFYLLPESQETSLPRNSRTTIYSSQNITEYSTEPTFRLAYRFNNKGEHKGASGRNGGIDILGRGRNYEWLWTTYEQGGWFYDLNGIQREMINGFQKDPRNGVELTVKPEFVYINGTPYLQLRNILYNPGNNTVTGQKFGASADVMIHRNDAAPLMHTSYGAYMTDSETNPSLELMFVCESGDGINPVDTLWLGRYGGGSHLNYIYDDNRNEIRGEDSAIGFSYQNIDLAPRQKKEFIVRFTLARTEN

SEQ ID NO: 107879 - protein, 133 aa, Unknown
  Obtained from environmental sample
  misc_feature (1)..(133): Xaa is any amino acid
MIPFGEEGMARVEKHQRQRAAFRFTTMEKPYRVSDIQVPSSAVILLEDVSNLLGNALFEDGGDEDSVFTDIAAMRARCKDSVLVSIGGLAAQSDHPQETVAYIAAMERLYRRLIGFCDTVTEMRDGTPVFLKW

SEQ ID NO: 107880 - protein, 269 aa, Unknown
  Obtained from environmental sample
  misc_feature (1)..(269): Xaa is any amino acid
MGYVSGMQVMGGYRQVMMDVWGYPIGIAMPTKYGLFSPYLVALTTGDFNVINEDGILTGDRAQSSYTALGVGWARTIGGNIAVGAALKGAYHYIGAADESYSADGFAFDLGAQYRQRNDRIAYGIALRNLGFVRSGYWGEWNEYEMPYGVEAGVAFIPKHIPNLRIALDVNKFNGDYTNFEPAFEYTIVAKTFWVRGGYAFSMMDVEKMLDVFRGERDDTYSKSSVNTLSLGVGVATAMDNVDLKLDAAMQFYTDXSSPAVIVSLLVGF

SEQ ID NO: 107881 - protein, 134 aa, Unknown
  Obtained from environmental sample
  misc_feature (1)..(134): Xaa is any amino acid
MCVQVFWKFVAELGVVIASYVGDFLFPAFSVNLDKLSHCFGAYSGGRLNASRFGQVADRCFNEIVFAVAAVENPRKDTAVFAVTRPHEMSFAVFAEPVNKEDFRQFVAVAFVFRFLAEFKPVREIIAHVVTAEG

SEQ ID NO: 107882 - protein, 111 aa, Unknown
  Obtained from environmental sample
  SIGNAL (1)...(22)
  misc_feature (1)..(111): Xaa is any amino acid
MTVASRFSAAASFIKAGASSLATTTAILSWDSEIASSVPSRPEYFLGTESRLMSSPEASSPTATETPPAPKSLQRFMSPHTSGFLNRRWSFRSSTAFPFCTSAPNRSTRPI

SEQ ID NO: 107883 - protein, 367 aa, Unknown
  Obtained from environmental sample
  misc_feature (1)..(367): Xaa is any amino acid
MHANAVVIRLNVEKYRLPDFSLRMPAVQCFQFPLQRFEKRFGACVVPAIALPAHALPNCRRSFPQNIPEGLGAILDAPVRMEYQAALRAPVFDCHFKSGDGCLGSFHAKAKRPANNFPVKQVKHYGQVYPAVYRTQIGNVRNPLYAAGFGIKLPGQYVFRDCKGMAGVGRRDMLPAPSGIKAVFPHQAGHFLKADPFSVGIAKFPAYPRAAIPAVMLRRYFHNKAYQLRIGFLTPLRGPDPGPSVIGAAAYPKKHGHLLNGVSVLVRFHELIRHYWGSPCAKMTAAFFRISFASLSALFSFRRRASSASFGRPWPGNACRPLPADSREACIHRRSIFSLIPKSAAIRLTGFSFFSANATASALNSFV

SEQ ID NO: 107884 - protein, 182 aa, Unknown
  Obtained from environmental sample
  misc_feature (1)..(182): Xaa is any amino acid
MVKLRTSSNAILISKIAAETVAKAVEANDRQHDENAGGKSAPGRVDQVILRFGKHPSPAWFGRLNSQSQVAHGGFGEDRVGKAQGGGRQQLRRKVRQYMDEYDSRAAGPKQTLGQYEVCVPVLQCPASYNAGKAGDKQNQQGGEKGKLAVAKNRGHYKGEKNPRKRAYRVHEAHDNFIADSA

SEQ ID NO: 107885 - protein, 305 aa, Unknown
  Obtained from environmental sample
  misc_feature (1)..(305): Xaa is any amino acid
MGKFGDVNAARGHISRHQVTQASSPYLAQHGSTPGLRQIGAQFVGIVAEALKHGRHIMHIGLGVAENNGRSRILRFQNAHQRPVLVHGKAFAQDMFAFRHIRLLVRKRQHGGFKQKFVRQLQHMRRIGGGKETGEHSPFGQVALHFLHIRVKTDRKHAVGLVQHQRVQRVQGQSAPQQMIQHTPGCAHHKLRALAQRLHLLAVADSAIDSHRRKRRSGSQHIRLMRHLQGQFAGGNQHQSLHGALSGFDPVEQRQQISACFAAAGTRLHHQIASSQKIRQGILLHGHEPRPSGVAQAARKESSAI

SEQ ID NO: 107886 - protein, 100 aa, Unknown
  Obtained from environmental sample
  misc_feature (1)..(100): Xaa is any amino acid
MNMTSRRLAKPVYKRQQFLLSFLKELNEPLTAIEFQKLLFLYITENNLTYYEFVPYLYGGFSIQAGEDINTLQAMGWLTDTNGKIQYTGTDELSGLNLPF

SEQ ID NO: 107887 - protein, 100 aa, Unknown
  Obtained from environmental sample
  SIGNAL (1)...(21)
  misc_feature (1)..(100): Xaa is any amino acid
MFLRIFFSIFLLFSKSTVSWARSTSETMSPIPSIRDAIRSGWKSSKPSGFSPTPTNCTATPVTSNIDKAAPPLASPSIFVRIAPVNPTSLWNSAATLTAS

SEQ ID NO: 107888 - protein, 202 aa, Unknown
  Obtained from environmental sample
  SIGNAL (1)...(25)
  misc_feature (1)..(202): Xaa is any amino acid
MIRLARGPXAGALCSAAGGFVGSLVAPHTAWLGLGTFIIGTVTAFTSGCIAWSDWPPVSINQRGALVVNGGIIVYLVGTLLWLSQETGRSLVLFPLVYYGAGFAALVVGSIFAGRILAGKRHTLKFIAVWLCAFGGMTGGATIGNFFSLVLYKLPRETWIYLTVAAPIERTIFSLGAALIGVPLLAALPKIGIYVGPMTKEE

SEQ ID NO: 107889 - protein, 169 aa, Unknown
  Obtained from environmental sample
  misc_feature (1)..(169): Xaa is any amino acid
MSETNLDSQIQEREDGMYPVGVNGTWHGGIHFTPAGDQWIKSMLSGKIVGGKIQKDYFNISYLKEITLTEYESLPEDEQEFYTKKEDGIYVLKDAAKPLEHKYSTSYILLEHSLIIPSVDESNTKEERVSINFFMLYMHLRPFGEFTTRQQITEDIILPFYLKWTDGKI

SEQ ID NO: 107890 - protein, 155 aa, Unknown
  Obtained from environmental sample
  misc_feature (1)..(155): Xaa is any amino acid
MGCFRIPSRSPQVRVPITFIPCGRRIYTARFGQYGRGLFSYSPAFWTSFCSANSSALPCLICGSCSSAWNFASGFLQIPPRGGHPCLWLTLPTAIHVADFHRQVIAHAGHTDKGIAKQFQRTKNVAEKKRTKGVSPTAFFRSPSRRKAAKHIQTC

SEQ ID NO: 107891 - protein, 139 aa, Unknown
  Obtained from environmental sample
  misc_feature (1)..(139): Xaa is any amino acid
MYQKRWAIEQKYHTLKNKMKFESAVGKASIYVKQDFWAQALVFNIIQDLAAVAEAKAQKKAKSKKYLYDVRINENMAIGLFKEQFVRLMTEEKDGKQKEMGLKLIADIERYVVPIRTLKSAPRRPRKSNKYKCNLKPTF

SEQ ID NO: 107892 - protein, 170 aa, Unknown
  Obtained from environmental sample
  misc_feature (1)..(170): Xaa is any amino acid
MLIDDRAGKFIVTSSSRWQSENPDVIDISKITNFRIDIREITEEIKTQDSDGNSVSYSPPRYEYYYDFYVVINVNSPYFSEIEAKLNKNSAGYRGSPEYRDFERQVYDLQEALKVRPGAQGAAAANSPPNTNAAQGTPAASKTPKFCPNCGAAVPSPLGNFCSSCGGPLQ

SEQ ID NO: 107893 - protein, 116 aa, Unknown
  Obtained from environmental sample
  misc_feature (1)..(116): Xaa is any amino acid
MVGLLPRRQRRGAVYVERLPVLQVYLVLHVRHCGDDVHVKLAQQPLLYDLHVQQPQESGSEAEAERRGGLRFVGDGGVVEPQLLKRGAEVFVFPFVNGVYAAEDHGLHLLVTGYRF

SEQ ID NO: 107894 - protein, 270 aa, Unknown
  Obtained from environmental sample
  misc_feature (1)..(270): Xaa is any amino acid
MAFSRERKAPVFCGEFGVYMIQSPAKDRVNWYEFVTGLLERRKIARASWDYFGGFGIFNNPAGGDFTTDVNIDVVRAMGFIPPPQRARVPKPLSSGFTIYGDYPSRDFSIGYWGEGSVFSMYDTNAAEGEYSIRWGNTSQYDIFWIAFDRNGDFSDLAASGYCLEFRARAEKPVKFDIRFVNPENAASIPWRMRYSIDQKLLPPDGKWHAIRVPLAGMTEHGAWINATXTWLGPQGKFAWNNVKQMEFVSEEGDMKNCYIWFDSIKICQP

SEQ ID NO: 107895 - protein, 199 aa, Unknown
  Obtained from environmental sample
  misc_feature (1)..(199): Xaa is any amino acid
MHVHKYHVVFARRVGYHLQRLGPVLGELYLIPRAVQQHVQDFAVISTSSATRRFLPANASPASTVGLSASPLASERSGSPSVVFPRSAFTVKMNLEPFPSSDSIHIFPPISSTMRFDMTSPNPVPPNSRLVPPSACSKALKSLDCCSGDMPIPLSETAIRSSQTPSALPARVASRPISPPSGENFTALASRFSATCVRR

SEQ ID NO: 107896 - protein, 301 aa, Unknown
  Obtained from environmental sample
  misc_feature (1)..(301): Xaa is any amino acid
MEDILYGSDKQLFWYCDPFMRTCVDMNQGGALIDLRPYAAKINWPVGIGTKHVQDASYPFLVQSMYRAGYFTHYAGEGTIRSLKIHYNGEEADLCLCRTKAKFSQNGKTRSLTLDPVEIVFSDLTLTLQTVYDFEEGSSAIKTTRKILSMSKPAETEFEEYITACYGTTEYPEDMTCVTLTVRNADGGADGDAVDGKVINYNYKCREARADGAVYASAEIGAINTRVDFEPSGNAEAYVREGYAFSPMFTLGLKKKISEGGEFVSWLXLKRQNELPVSVLLYARFGHRHVLRFCQGRNILS

SEQ ID NO: 107897 - protein, 151 aa, Unknown
  Obtained from environmental sample
  misc_feature (1)..(151): Xaa is any amino acid
MYRIVLRGAEGPLVVNGVAGYAEHTPQHFLAHRHADGAARVLGLQTAGQSLGGGHRDTAHAVVADMLKHFKGNDAVTRAGFYFQRVQNQGYLPLIKTYVHNGTYYLCNISCITHSHSFLSYKHCSLLPVPCSLLICQLTQSRPRLSQPFPG

SEQ ID NO: 107898 - protein, 132 aa, Unknown
  Obtained from environmental sample
  SIGNAL (1)...(49)
  misc_feature (1)..(132): Xaa is any amino acid
MIVRIVRLLKLTAVGTSIKSERISTMSADSIATSVPLPMAIPMSACASAGASLMPSPTIATKRRWRFVSWENCLRCSPCGVPKSVSCSFLTSADLSCGRTSASTRSIPTCLAMASAVFLLSPVIMATSIPIL

SEQ ID NO: 107899 - protein, 118 aa, Unknown
  Obtained from environmental sample
  misc_feature (1)..(118): Xaa is any amino acid
MDKWEEMELKAHSSDVNDRAESAEYWYNQYAKLKIKTGGKVPAGYKEENKTRAIIKKFSDIPPGKPEWLWEGHIPRGMFVIIGGDPGQGKSAVGLDIAARISTGKPFIHSSLPIGRNK

SEQ ID NO: 107900 - protein, 211 aa, Unknown
  Obtained from environmental sample
  SIGNAL (1)...(21)
  misc_feature (1)..(211): Xaa is any amino acid
MPVLCSTVSTSFSLTTPAILATSLDWAMRREAVPPMWNVRNVSWVPGSPMDWAAMMPTVSPDVDQMPARQIAAVAQGAHPAFRLAGQGGTDGHGGNAEFVQPGGDGFVNQGIFRPEQFSAVRVEDRVQEHPAQGSFGQMGLDVAAFFHMAQLNAVHSAAIGFGDDHILHHVHQTAGQVAGVGRFQGGVGQALARAVGGGEVLQDSQSFAET

SEQ ID NO: 107901 - protein, 189 aa, Unknown
  Obtained from environmental sample
  misc_feature (1)..(189): Xaa is any amino acid
MKITVFGTSLHSSNGTHSAIAFECATICQNYFSRAFFRARKKTTQHNSVRTCRQCLNNIARIFYSSIANYANSLLNRFFGTFQNCRELRNSNACHNSGSAYRTRSNSNFNNICAAFRKSLTPSAVATFPPQALNWDKFFKRFYHIANIYMVPVSCIHNQHINASFYQSGGAFHSICCGANGSPNAKLPV

SEQ ID NO: 107902 - protein, 178 aa, Unknown
  Obtained from environmental sample
  misc_feature (1)..(178): Xaa is any amino acid
MYRMIFNTRSSYMLKYEKAKAKLIEFNIDKINYPKFPLNSDDLIYSTFYALSLYCEELIDNPNSKELSELFENIAFVAQYYDSTVKTKQNIKYNNLLLLLGATAYFLSENFGSAKVLIEQINEWEIKNEIITLLYLTLLFLLKINIIEAPTRNTRNYVESLKKHFLFGETHKNILGNL

SEQ ID NO: 107903 - protein, 154 aa, Unknown
  Obtained from environmental sample
  misc_feature (1)..(154): Xaa is any amino acid
MPFCRGETQAGKHGLGRLLRVVAVLRFQFCLARGQPDQGGLVGAGRSVFPCGPKLAPVGQNVLHPGKQGSIQRGFVQILGHIAHAAAARQDDAAGIGRFLAGQKPQERGFAAAVRPAHAQADARIHVQRKIGQDVAVAEGLAQVLDGDVHGSWL

SEQ ID NO: 107904 - protein, 191 aa, Unknown
  Obtained from environmental sample
  misc_feature (1)..(191): Xaa is any amino acid
MVPVVSSNVVSYTVLVRVENVRGNLFSGMTCAVDFIVENSENALMVSNAALRYQPNSLSAETIADMVFNASLENMNEEQRIAAMVSREQPRVQNVSQPPSTTTGITDVLMGGGRGFGGGQFNAGGGRQGQGGQGQSRNAAPAVVMRNLWYINNEGKLEVMQVRTGISSGSYTEIYVSDDLEGKQVILREKI

SEQ ID NO: 107905 - protein, 196 aa, Unknown
  Obtained from environmental sample
  misc_feature (1)..(196): Xaa is any amino acid
MTDYLRTVTLGAFTWKNEERIALLFEHISRVGTAWLLLHFLLLTFCLNFPVTLIMARLSPFELYSRLYGENAVEEIMGNPAAQVSAEEFNMRMIENGYGKNILIPLLGICFCFTMIIQAVFYLCAVFFLGLSRINLSPLSFHDRLGLSIFSSTLPVLSAVMFGLVLPTVHIIVFYLIVIFFIFQRNSRLRFAETFD

SEQ ID NO: 107906 - protein, 113 aa, Unknown
  Obtained from environmental sample
  misc_feature (1)..(113): Xaa is any amino acid
MNFYWKKSILYDIWLYYNVVRLWGLEYSIFNQIRLTQSIETRGSMMLTLSKISEAVQAVAPVYGIDMVYLFGSYAKGDATEESDCDLRVVGGDIPTLFVLGGAVRGFDGVSRL

SEQ ID NO: 107907 - protein, 212 aa, Unknown
  Obtained from environmental sample
  DOMAIN (159)...(192): Tetratricopeptide repeat
  misc_feature (1)..(212): Xaa is any amino acid
MSKYSDCDSALEILDKAIKILCELGGDGPCEAADLCIERAIVHGYKNESDLELAALTMAIELRGFDWDYQKRAHFYERAGDYDKALADYTTALDREESPESYLWRGAVFFEKKDYDSAISDFLNSVKCCSWCGDMPNDLHGPMRRLFRKDNGKRCGECLESFYMCGLSYHKKGDLKSAIKYLNKALWRDSDFEKAKALKEVILAEEKRSVKR

SEQ ID NO: 107908 - protein, 110 aa, Unknown
  Obtained from environmental sample
  SIGNAL (1)...(25)
  misc_feature (1)..(110): Xaa is any amino acid
MRAARRYRYRSRLVSAISVTLRAAAKGRLCTFITCSRIRFPTRTTLLPPSMSAMKYSPIEGMKVNITPENRPGMVRGSVTVRKARKRPAPRTRAASTRERSIFSALAYTE

SEQ ID NO: 107909 - protein, 108 aa, Unknown
  Obtained from environmental sample
  misc_feature (1)..(108): Xaa is any amino acid
MFYKRHFDIQLIKFARTSIRPRVFVAKARRNLKISVESANHKQLLELLRRLRKRVKFPRMNTARHQIVPCAFGRRTCQYRRLKFGKSVFNHLLAQMRNNLASQNDVVV

SEQ ID NO: 107910 - protein, 133 aa, Unknown
  Obtained from environmental sample
  misc_feature (1)..(133): Xaa is any amino acid
MFFICFYCCFYNMQNLFIIPADFYQGAGVFGETGTSVSWTRMQKLGTYSPVFTHRPRDILHIRACFFTKVGNFVYKSNFNRKESVGRVLNHFRRFKICFNKGSIIXIQGTVNVFHDIARSFALAADYYAVRMG

SEQ ID NO: 107911 - protein, 121 aa, Unknown
  Obtained from environmental sample
  misc_feature (1)..(121): Xaa is any amino acid
MDFVFKRTERVGNFLFRVGKRMLKIVHGIDTPRIAGTVMGFAPYSVHDRIAHYQVGVGHVDFCPQSFCPIREFTRPHFRKKIKIYFYGTVSVRAVPPRRSYGNIVLIRNRRPSVFAHFCIG

SEQ ID NO: 107912 - protein, 175 aa, Unknown
  Obtained from environmental sample
  misc_feature (1)..(175): Xaa is any amino acid
MGAWGDDNSDRRPCRFRQEFHGQGRGGAFRRRLPRHRGDVPRRHPKGAAAGHSVHRRRRSGRRYAGDGDNVRGRAARHARHNGRRGRERAGALRRGDQKRLRLLRQGCGKEVFSRPTEKDSVRLFRRLRGAGHLHRGLPKRRRQNIHDRVNGREGETPSKRLRGHGYKQIVEELI

SEQ ID NO: 107913 - protein, 131 aa, Unknown
  Obtained from environmental sample
  misc_feature (1)..(131): Xaa is any amino acid
MKIEIRKLTPELADDYVNFFDTTPHDYNVDEHKCYCVCWCSDDYEGKDFSSREKRRNYAFKYVKESILQGYLAYCDNKVVGWCNANTKSDCLKCASWLRFMGSIPTEESTPDVRVKSVFCFTIAPEMKRKE

SEQ ID NO: 107914 - protein, 103 aa, Unknown
  Obtained from environmental sample
  SIGNAL (1)...(72)
  misc_feature (1)..(103): Xaa is any amino acid
MPVCFLHFPIKFFFLLLHFLFKSFVVFLFFPLISFVVFLFFLFKSFVAFLFFPLKPFVVFLFFTLKPFVAFLFFTLKAFVAFPHFSFKAFRVYPSHCPYIFIG

SEQ ID NO: 107915 - protein, 112 aa, Unknown
  Obtained from environmental sample
  misc_feature (1)..(112): Xaa is any amino acid
MENPPAPDLHPRGYLREERASSAFYYRRNRETTRPRNNRRHRRGPASDVGGAVFSRREAEIIYQLGRAWNHGLRPRRGLRRESGEPRKTRGAFYRRRQFQDELRGDGDLKQQ

SEQ ID NO: 107916 - protein, 101 aa, Unknown
  Obtained from environmental sample
  misc_feature (1)..(101): Xaa is any amino acid
MKDANLFNMLLGDALKHGNSSVFTGENNEFMKTPDFGAQGHIAIKTNSLSRAKAYIERTGIAFDYESAQKDTKGNITCVISERRNSGICPAFGTSKITINN

SEQ ID NO: 107917 - protein, 166 aa, Unknown
  Obtained from environmental sample
  misc_feature (1)..(166): Xaa is any amino acid
MHAVSGLFHSHHWVLFAFPSRYYTLSVIGSYLALEGGPPVFAPGSSCPALLLNRPPANPSSKGLSPARAPLSSGLQGLIHRIMPAYPALLRFGLLPLRSPLLRESRLISSPPGNRMFRFPGLAPALLRVSSYSLRGCPIRIPKGHWMELLALAFRRCPRPSSPADA

SEQ ID NO: 107918 - protein, 129 aa, Unknown
  Obtained from environmental sample
  misc_feature (1)..(129): Xaa is any amino acid
MDQIVVDIRRNTDGLIGWQRPRRCRPDHRKDLTLNAALDAESRRQRGFIDDFEARIDSGRCLVFVFDLGLGQGGTTVDAPVDRLLPANQKPFLENLAQGAQLVGLHVEVHRPIRVVPIGESPQANKVAL

SEQ ID NO: 107919 - protein, 337 aa, Unknown
  Obtained from environmental sample
  misc_feature (1)..(337): Xaa is any amino acid
MPVPKSMGQFEQALKAFRDRDPGNVGKNRVVPLGVNADVRWGLSDFINHFVDPKLSDRDRWVNSIADRYITMPGFKRGVQEMNKWYNDGLIFKDFPLMTTADDFYNQIKSGVVGSFCQNWDFPYRTDMNILVDLRKNVPGADFIPISITNNKSVMDKPGLRIFIPQFSPNKDSALRYLNWLAKPENYKFLQIGNEGVNHKMVNGIPQTIATPPQHPWFMNSPNNIDITIPMNGVELGSDAANARVLGLSYGTISPDVISNAYVVSTTDARGPAVWQATTKVNQYSGDLREKADDLVSLAITAKPANFAKVWDDGIKDWMNSGGREVLAERNALYPKK

SEQ ID NO: 107920 - protein, 102 aa, Unknown
  Obtained from environmental sample
  misc_feature (1)..(102): Xaa is any amino acid
MDNGNHNFARKMSKADNGVQSVAEFGSKDFFYSFVYRAVVLNTISKTNKTLANLSRSGVACHYQNYIAEVRLASLIVGKGGVIHDLQEYIEDIAVGFFNFIE

SEQ ID NO: 107921 - protein, 112 aa, Unknown
  Obtained from environmental sample
  misc_feature (1)..(112): Xaa is any amino acid
MCLYALRSVHHQNCPFASRKRAANLVGKIHVPRSVYHIHQIFFATAFINHSYSVGFYSYASFPLQIHIVQKLLHHLIFRNRSREFNQAVCERAFSVVYVGYYAEISYVVCLH

SEQ ID NO: 107922 - protein, 114 aa, Unknown
  Obtained from environmental sample
  misc_feature (1)..(114): Xaa is any amino acid
MKCYKEQASSSDGKRGATDIFMKDVYVDLEKLESYKLNNICQDTVLLVMTDLKRFVYPKNRDAKCWDYDISDGFILSPKTLSTPIGGKEDISIKINNEYLFKWTEADKYYFLIL

SEQ ID NO: 107923 - protein, 211 aa, Unknown
  Obtained from environmental sample
  misc_feature (1)..(211): Xaa is any amino acid
MDGHFVLLARDQFLEFGGDHLAVGVGVVAVDDGGEGVYGGAVYQYVKLYQIVALITGELVVHRGVTLGTSFQPVEEVYDQLRERQVVVQADPRRFQILHVDELAAFLVAEFHYGAHELRGRDELHSRYGFADVFGLLSRRQCGGAVYVERFAVLQVYLVLNVRDCCDDVDIELAQQPLLDDLHVQQPQESGAETEAERRGGFRFVGDGGVV

SEQ ID NO: 107924 - protein, 141 aa, Unknown
  Obtained from environmental sample
  misc_feature (1)..(141): Xaa is any amino acid
MYMGYEKKLAVYIDILGTKNSDYDELYKINHIFHNELFRLENDKCLVKKFATSFSDCAYIIYEINEHNENNENETAFYYYIHESLTDLAYTISTIQINGFMCRGGISYDDLYYDEKKNILFGPAINKAYTLETEAIMPRII

SEQ ID NO: 107925 - protein, 128 aa, Unknown
  Obtained from environmental sample
  misc_feature (1)..(128): Xaa is any amino acid
MIVIDYLLRNTDRNSGNYGILRNSETLKWEKIAPVFDNGNSLWYNAQGIQFINGNSKCECKSFAGENEKNILLTGNINWYDKNKLNDIKKVISDVFKNNKYIEEERVEKIINEFHVRVNNLEIVLKRE

SEQ ID NO: 107926 - protein, 200 aa, Unknown
  Obtained from environmental sample
  misc_feature (1)..(200): Xaa is any amino acid
MGKFMAGKLGVVGFDVHAKIFFKTPLAQEANNSFRVKIVLVFGRLHRFWFNIEGALKALFAPIIPRHGKETGKIFFFFFKVGIEQAHVTFASAPEGIALAAEFNRGVNGRFYLGGGKRYNAKFRVGSGAVHETGIAEYICRSPQQFDAGGFLKFFCLGYQREKIFLAFGGGGSFRRDIPVMEAIQTRAQLVKNSNAASIL

SEQ ID NO: 107927 - protein, 167 aa, Unknown
  Obtained from environmental sample
  misc_feature (1)..(167): Xaa is any amino acid
MDVADRHRCPVLVLAHLDGGGFVFAARAAAVLAKHVAPPCPEAAVALDGHRVEVAGSHRRPVLVLAHLDGGFAVGFGAVAELAQVVLPPSPEGAVRLDAQGVGPAGGERRGLHGRGCHQFRGRQGSSELLAIVNNGWCDLFADNQLLHGWLLHGRQRCIAWLARLGG

SEQ ID NO: 107928 - protein, 368 aa, Unknown
  Obtained from environmental sample
  misc_feature (1)..(368): Xaa is any amino acid
MTDSAEPRNLCIGGIYANRINTASIDTNITDIINKSGVAVCIDTYTARIVDASRVINHALAIINTDIAAYVPIIRRIDIVRIYTIRINTAYINTHTADIINRLGIAVSINTNIARIVDTSRIINRPLPIISAGIAAYILIIRRIDTICINTAYINTRIADIINRLCITVNIDTDTARIIDASRIINRYLLIINTYISAYILIICGIDTARINTAYIDTHTANTIYWYRLINTDRAAHILIINYAYTARPNTNPARLRRRLLELLRLLRLLRLLRRKPPIDSRVCVHYLSAARACVDIARRYGRRSVNRELRVDMRECFRRFGCVDIGSARRYRQPADGGLRIGRRRVALRPIAAYPAVSRRRIMPLTV

SEQ ID NO: 107929 - protein, 337 aa, Unknown
  Obtained from environmental sample
  misc_feature (1)..(337): Xaa is any amino acid
MILQVFFPLGYLVALYLLGAKILFVALSSEDLDIHHRTLDARRDVEAGVLNVGRFFAEYGAQQLFFGRKHRLSLWGDLAHQYVAVLDSGPYPDDARLIQFLSISSPTLGDVAGDFFRPQLGVPGHDLKFLNVHGGEGVFLDRALGNEDGVFIVVAAPRHEGDHQVFAQRQFSAFDAGAVGQHHALCHALPGMAGRGLAETGILVRLVIFQQVVGAHAAQVGIERILVADDDPVRIGVADHAVAFGQKAGAGIAGHVAFHARAHQGAFGTQKRHGLALHVRTHEGAVGVVVLQKGNERGGNGNHLPRRDVHERDFVAFGHEHVAAPAGGQGIVEETAA

SEQ ID NO: 107930 - protein, 116 aa, Unknown
  Obtained from environmental sample
  misc_feature (1)..(116): Xaa is any amino acid
MFKSITSPSAISPTETLTPPAPKSLQRLIRRAAFGSRKSRCIFRSSGALPFCTSAPQVSSEDDVCDLEEPVAPPIPSRPVLPPKRITTSVGDGVIRTTFFKGAAPITAPISMRLAA

SEQ ID NO: 107931 - protein, 135 aa, Unknown
  Obtained from environmental sample
  misc_feature (1)..(135): Xaa is any amino acid
MEARDRRCNDRPCRRHVQRPPGRHQDRLRQRLCRRGGLREEGRRRTRVRPRTPERSYDGASGDQAGREAGGRVHRRPEPRVQERRQDRVLLHEAGQERRSVHLRRDRQVASQGESLRQRRNRQLEPERQERQCGC

SEQ ID NO: 107932 - protein, 118 aa, Unknown
  Obtained from environmental sample
  SIGNAL (1)...(22)
  misc_feature (1)..(118): Xaa is any amino acid
MNMVNTAAVAAARFVVTKILLADTISSWLVMATVEPPLKPNQQNQRMKTPSAPSVRLCPGIAFDSPVSEYLPIRGPTIFAPTSDAMPPTMCTAVEPAKSWKPSCASQPSPQIQWPDTG

SEQ ID NO: 107933 - protein, 294 aa, Unknown
  Obtained from environmental sample
  misc_feature (1)..(294): Xaa is any amino acid
MIQELTVAGKSEDWGKSLAMQWIAQEEPELYYVDGHVQVYYGYMAELGKKHVSRQRLCLAGMTEFWVNSTEGLPLFFITSQVNEKMIEMLESEIIPRLKELHTVSEEQQRKIDKDKDYPLFTIVFDREAYSPSLFKKIWDEHHIAVLTYRKNVKASDVWDEAEFEDISVDTRLGKTQMKLHEKQITLDGYSMREVRRLTTNGHQTSIITNNKILSVALIAGYMFGRWVQENFFRYLRQDYAFDKIIQYAVDEVDKTVMVVNREYSNIQYEIKRHREKLYRLNPSIQLLQNPPKR

SEQ ID NO: 107934 - protein, 185 aa, Unknown
  Obtained from environmental sample
  misc_feature (1)..(185): Xaa is any amino acid
MARERILAMAHADFGQVVLGFFTRVFFRHTQHVHRGFHHVFKRGHVRPQVEMLEHHRQARTHALQLLGVGGLHGAVLVGHQFQLFVIEQNLAGVGLLQQVDAAQKGTFARTTGTDDADHIAGRGGQGHTFEHFMTAIAFMQVLDFKFVHAVGSHKNRWSVVEQAPVTQRFAPRHLGQPETRLGIT

SEQ ID NO: 107935 - protein, 104 aa, Unknown
  Obtained from environmental sample
  misc_feature (1)..(104): Xaa is any amino acid
MDPNRGKKPKPKLERTPDGQCGHVGVTLQQTDNPDAIIEIKVDRDRLPPGDWKHSGYETRQIFDFQIVTHVTEYQAEILVNEMGDKVTAEFPPARCKKPSMVMG

SEQ ID NO: 107936 - protein, 110 aa, Unknown
  Obtained from environmental sample
  misc_feature (1)..(110): Xaa is any amino acid
MHFRLALELEGLCNHPDNQRLVISGDLGDYGSGSGAGAAAHAGGDKHHVRAARDIADLLLIFFGRFLSDGWFAAGSPSAGNFGANLQFGLGLAFFQKILFIGINGDKLDA

SEQ ID NO: 107937 - protein, 147 aa, Unknown
  Obtained from environmental sample
  SIGNAL (1)...(24)
  misc_feature (1)..(147): Xaa is any amino acid
MPKNKFTLIIPALVFFLCVTSCTKKDASDIVEIGEKMFIAQVNDIYLNADDYLGKTIKLEGVFKKSTGEPPYYFVIRYGPGCCGNDGLVGFEVAWDKEKAKPYPADDSWVEAEGVLKFYEEQGYQLSYIDLTSLNVLAKRGSENVLQ

SEQ ID NO: 107938 - protein, 289 aa, Unknown
  Obtained from environmental sample
  misc_feature (1)..(289): Xaa is any amino acid
MIYKDGEYPYLFNLIDQYRHLEKYNGGEAYNMVFVGPGWMNKAGRWEVPFELSVKSYEDCLAYYGKLKKEGHCVDMTMAEYAGYYRSKKTYTTPECALWKDILYGSEKQLFWYCDPFMRTCVDMNQGGALIDLRPYAAKINWPVGIGTKHVQDASYPFLVQSMYRAGFFTHYAGEGTIRSLKIHYNGEEADLCLCRTKAKFSQNGNTRSLSLDPVEIEFSDLKLTLQTIYDFEEGSSAIKTIRKILNMSKPAEVEFDEYITALYGTTEYPEDMTCVTLTVKGSKWRGNN

SEQ ID NO: 107939 - protein, 129 aa, Unknown
  Obtained from environmental sample
  misc_feature (1)..(129): Xaa is any amino acid
MREILQFYGTDICRTLDADYWLRQAEKFEKELPNQPDLIIFADMRFDNELAFVKKQGWCIRLEAYEGYVPNNEHRSEKDLDNSDFDLVLRPAFGELEKTAESALPLVLHALQKFTEKIQGAAPEETRHV

SEQ ID NO: 107940 - protein, 146 aa, Unknown
  Obtained from environmental sample
  misc_feature (1)..(146): Xaa is any amino acid
MTGTMGNPVVRFMAEPTLSELDILSILTFGERMGGMGSDINNRLMNIAAQQAIGLGTRRLEKLLNLDRVSVSGDVLGTGNSQSAGATIGVSKRFTSRLNVTYETNTNKLSDRKVTAQYRLLPNLFLEGLTTSDGENALDLILRYSR

SEQ ID NO: 107941 - protein, 142 aa, Unknown
  Obtained from environmental sample
  misc_feature (1)..(142): Xaa is any amino acid
MFAVVVKNCEIKRKPPQFLHQYVKRFGNTRRSGRFTLYNGLVNLGTPCHIIRLDRQQFLQGMRRTVCFQSPDFHLSQALTAELRLAAKRLLCNQRIGTCTAGVHFIINKMMEFEEVNHPAKNRVYKIFTGSAVAQHGLTRNG

SEQ ID NO: 107942 - protein, 235 aa, Unknown
  Obtained from environmental sample
  misc_feature (1)..(235): Xaa is any amino acid
MPPGHFVAFAEFALGSDKHFYHFVNAGAKIIPFCPLEPLYVNHRSFNAVIHHKGRVTHFLGLLSKDRIEEFEFRRCLGFAFGCYLSNEYIAGADSRADADNAFFVQVVQTLLGSIRNLIGDFFRPQFGLPYLCYMFLYMDRGKHIFLDHALGDKNRVFVVVTVPGHKAHENIPAQGKLPVLGGGAVGDYLSGNNFFAHLDNRPLVIAGVLIGALEFHQFINIIAIFVNKYLRQRF

SEQ ID NO: 107943 - protein, 122 aa, Unknown
  Obtained from environmental sample
  misc_feature (1)..(122): Xaa is any amino acid
MSTKRYKFLYKSSPQQSPDDVFAYFPFESKNGETWETPYERLVKLARMEDWNFHKPEYRAKYKQKYPILTNYLNHTFLHAQDLNLIVFSDNDDKACFNTGLPNRKRKGYFWIILSKQKSTPT

SEQ ID NO: 107944 - protein, 449 aa, Unknown
  Obtained from environmental sample
  misc_feature (1)..(449): Xaa is any amino acid
MFGTNIRLRDSSQVMDKMINAVPFIDSKEKSRWSFEGELAASYHNSNTSARRSALIDDFEGSSLSLQYPLSRLMWFKASPPGGTTDDQSTYIEYLDYKYNGEFVWHSNTSMRYRNIYTPIGNSDVDNREITILSFRLRPNDNLSGKSWGGVMRPNGSYYQDLSQKRYIEMVVRGNVGSLYVDLGLISEAISINGYEPDNNMLYSECSMGTTTPLHDMGLGYAAGVYGKRVVWDCRYAQCRSDTLPNISVDRFDQNLLNSNDPGPQINGTEGNAGERICDSEDINRNGQLDEDNRFVRYRIDLATEDPTKFDKLQNGWRRFRIPLDQIDTIISTNGASSEDILSQSGFVRLWYGKLGTGISEGRAQIADFRIVGNEWMESPGSNEFGIVSNPITQDVTGGIQGEIYAPGTVVVPDSNYMRIKVINNRDDAGFYFTSPNTPLERDPDTNAP

SEQ ID NO: 107945 - protein, 223 aa, Unknown
  Obtained from environmental sample
  misc_feature (1)..(223): Xaa is any amino acid
MILPSQYYEEKLYPLQDGVMNILQHSGTDFFLTGGTALSRAYYNHRYSDDLDFFVNQSQTYDDQLDKVLALLQENGYIWDTNNEYTRAKNFTTLKVKKGSDTLLKLDFVNDLVPHYGEIVETDLFYRTDSIRNMLSNKLSAIFRYAAKDIVDIREIALHETVDWPTVINEARNKEAGLELVYISEILTSMPESEFETIAWTRKPSWQEFRGDIERIVYEMISG

SEQ ID NO: 107946 - protein, 202 aa, Unknown
  Obtained from environmental sample
  misc_feature (1)..(202): Xaa is any amino acid
MVVDPPGYEFLTVPRLPRNKHRGPATRHALRELXYLHELRGAAHVIPPVAQLVFERLVLGVEHLVLDNERAVLERLVNRHLNLLQKGVVLLKEGKGALLHSLNGDLDLAEAREYQERHIGIDGLYVLQEFNAGHLRHLVIGYDEIEELAHKRFHSLRPVRRGLNVIAPTAQDFGDGFSHEILVVYYQDVSFFHVGPSLFLCF

SEQ ID NO: 107947 - protein, 125 aa, Unknown
  Obtained from environmental sample
  misc_feature (1)..(125): Xaa is any amino acid
MFCTQVRDNSFSEYADEYFDLFFSFGVLVHCNQNLICDILRNALLKVKIGGYALHNFGDWKKLTAWGWDRGTIPTSFAQLPDDEIWWPRNTTAIMVKLAQEVGWTVQKADLGYFQRDGIILLRRQ

SEQ ID NO: 107948 - protein, 277 aa, Unknown
  Obtained from environmental sample
  misc_feature (1)..(277): Xaa is any amino acid
MRQAVTVKLLSKKKVTEREGWSTNDYLVTNLALQNNTEKDVSGVMGKLAVVDQFGKTIVDIQTVRMDSERVIKNHEMIKAGATVESLIRQKLYDGRVVNGKFGENDADRFLSLSDDQFKLDWQPIMVVFADGSRMTKYQVVDADAQRETAVNDLRQAVSVKLLSKNFSGDGGGRMFGNLVTNFAFQNNTGKDITGVKGTIHFEDQFGDALQIEPYGVLIEKTIRAGMAVELSHKGSGGWGDHKSFASMKDHQFKVIWEPETIVFADGSKIDGTSKSR

SEQ ID NO: 107949 - protein, 138 aa, Unknown
  Obtained from environmental sample
  misc_feature (1)..(138): Xaa is any amino acid
MRSCDSDMASSVPSSPSYFLGTASKKMSSPAASSPTATATPPAPKSLQRRIILPTSGSRKSRCILRSVGALPFCTSAPQVCIDSSVCSLDDPVAPPHPSRPVLPPRRTTTSPGTGSRRTTCDLGTAPTTAPISIRFAM

SEQ ID NO: 107950 - protein, 204 aa, Unknown
  Obtained from environmental sample
  misc_feature (1)..(204): Xaa is any amino acid
MVPGVXARQAGEFIVLRPIEMPPVNDNAAYGRTVAAYKFGRRMNDDVYAVINRAQEVRRGKGAVHDNRNPVAVGDCDYRFNVYNTGVRVAYCLKKQRLCIGLNRVLKTCRIAAVHKTYINPQVFKCIGKQVISASIELVVRYDMIPASGYIQDGVGDCRRARRGGEGRRSVFQGGHAFFKDIPCGIHNARINVARFGKRETVRR

SEQ ID NO: 107951 - protein, 188 aa, Unknown
  Obtained from environmental sample
  misc_feature (1)..(188): Xaa is any amino acid
MSFPCPQIKSLNNRYVRNYHVNIIEIAREAEWKLPEFLKSQRELFTCSSCGGIINQHRKICSECGQEINLLVSELQRVKRNQGMFHLLEDDEYKDRKNLIKKFEAVYGNEHVFKYAMLKLLKEHEKKATVFGLYFGFQKDPINFSEIGKMLNLSETRVGVLCKKAFRRLNWPKFRREVWEEYGYKDKE

SEQ ID NO: 107952 - protein, 361 aa, Unknown
  Obtained from environmental sample
  misc_feature (1)..(361): Xaa is any amino acid
MAEVTCPAFVGLFPINVLGVTAVRHTLTPTVGYTFSPKHELDRTFYNVGIGYAGPRAKAEQLVTFSLSNSFQGKRIVAGRDRDVNNKKKNNDTVDVVMDTNNIVDTGIVNNINSDDNVIDTASVISINTAPKDNDKDKSKTKTKEDKREEKFDILTLSMNTACDIGAEKRRWRDLGLSAGTNVGILNVSFSSGFWFYGEADEFTPPTINSYSVDLTSGRLGASGKLWDGDLLELGLKNPGGLTAADGSQSWNIGVSPGLSYRASRRLPSDRFAPTKSFNVSSTANVNLTKSLSVRWSGNYDFSSDKFSHNSFDFYYDMECWEMRFTWRPEKINPGFNFVVNVKKIPDIKWEQKETRSTRVL

SEQ ID NO: 107953 - protein, 174 aa, Unknown
  Obtained from environmental sample
  misc_feature (1)..(174): Xaa is any amino acid
MQRAILQTGIPFGEGLGSLRHHRSWFFTNNWDPDMSIIRQDRNSLRFMCVPHDSIYVGEEDHTHQPCRTPCRSQGHAQFKGYCAPADAEETAEAWAMAMERTDGPTVHNSYKAEHGRLCQRRSRMEGQAPHRRLYRQKARRTCRCGANRHRFRSKQKKGGCGAFRKKCAGGNHD

SEQ ID NO: 107954 - protein, 157 aa, Unknown
  Obtained from environmental sample
  misc_feature (1)..(157): Xaa is any amino acid
MSRMSPEATEAVLAPETEKVFLHLLTIETSGGAVLRFADNNQNITSRGIEYFAAAFNIILPEQTEDAPRPCRLAIDNTDTVIFQTIKQAVGQDVFATVCVIMADTPDVYERGPLKYRLRNVRASKETIDGEVYDFYLLDRKFPRDTYTPEDFEGMFF

SEQ ID NO: 107955 - protein, 368 aa, Unknown
  Obtained from environmental sample
  SIGNAL (1)...(27)
  misc_feature (1)..(368): Xaa is any amino acid
MVPSFEVTVMVALPGLIALISPSSPMVATEALLLAQFRRWLAAAGSASCSVCVLPQSKTSAFLPVNTPLSGIATVRRQAAVWPPSSALTRIVDVPSANALTTPLGLTLATFVSLLDHSIPPSTAFSGTTVAVSVLVSPGLRMSSALTRLTLGTTVRAHVAVNPPSFVVAVTVAVPRALATNAPSLPTVAHSALSIAHETSRLAALLGWTCALRVSVCPRARVRVCLSSDRPLTFVAQAHRASTSAAAESPGSNGRGFTGGSLRNCPGGLLAGASHEYGIGPGVGFPVAQTLRFAIFPHRGRASALLVARLVKVKACANPVRVTAVHPDRPRRWTGDTVKALRHTVFPQYGRGVAGLAVLASCHVHILA

SEQ ID NO: 107956 - protein, 226 aa, Unknown
  Obtained from environmental sample
  SIGNAL (1)...(23)
  misc_feature (1)..(226): Xaa is any amino acid
MKLKPSITAIFIFFFIALTAVYSQNTTFPRIQPEPKALEYHRLGEKGGYSWTELAEISLWASGDTSTANLEKIRAAAETIKNAVDLPESYEGKAEYVLMFMHKNLIRSYSLNQTRIDTMLSSGRYNCVSSAVLYMILCESLGIHTNGVMTKDHAFVSIPIGDTVIDVETTNAYGFDPGNRKEFHDQFGRLTGFTYVPAKNYRDRETISQIELVSLILNNRIGIMKG

SEQ ID NO: 107957 - protein, 272 aa, Unknown
  Obtained from environmental sample
  misc_feature (1)..(272): Xaa is any amino acid
MSLSGCFSRWQGDSAQLIISFSGAGRAAAAYDPKDSETHKRLEHRIVLTSEEETLNFTFRAGTAIEATITPGNWNVRVDSWQGEAVYATGSKDVVLNFGQNNETIQMFQAFLVTFDVNGGSGVVPPIVAKRREEITLPNASWLSKDGHAFGSWNTNAAGTETSYAAGSTYTVEGSITLYAVYKDAPFTVIITVDNNLSISKGGSVTLFIPENFDRYEWRAGETTLGEGKSITIQANNPVFTQGYNWITAVVYIGTGDDAKSLSVEEMIHVSE

SEQ ID NO: 107958 - protein, 198 aa, Unknown
  Obtained from environmental sample
  misc_feature (1)..(198): Xaa is any amino acid
MSSLSMVAAAFGHILENLFLYLLIHAFERLGKFLRVHFPHDFLDRAVVQHDDILEHEHPLLDLFGEFRVFVFQGLNNLLLRGAVDKVEDFNDAFNAARRGVILAGQGRKFLFKHPLNLAEYFRAGTVHCRDSAGHVALHVVVQILQNNRGPCWAQISQDKSYGLGMLLLDEVQEVRRISAGDKVEGAEPWRLDVRAVE

SEQ ID NO: 107959 - protein, 197 aa, Unknown
  Obtained from environmental sample
  misc_feature (1)..(197): Xaa is any amino acid
MRGAVDRLLRGRGRVDRAHQTHFDTPVVVQNLRHGGEAVGRTGGVGDDRHLLLIRLVVHAYHEHRRVVLGGGRHHYALRPGLDVRLGLVLREEEARGLNHVLRAHIAPLQVRGILLGGDADGLPVHYELPVLGLGRPVEAPVRGVVLEHIGHIIHVDEVVDAHDLNVRRLLHSRPENQPADPARKRNADFDSHKYAS

SEQ ID NO: 107960 - protein, 265 aa, Unknown
  Obtained from environmental sample
  misc_feature (1)..(265): Xaa is any amino acid
MVLLRTGFAEPAASPRQLVGSYPTVSPLPQRRALRRFAFCGAVRGFRPLGVTQRPALRSPDFPPRGPGEPEPRSGGLSGFARYGGSAAXKAGHSRRCSRRGSANMALGGAYAFFRSVEVFIPVNQTLALRATENLLAALQFDEGLRRDGDVATRAYPLVDRDDDRMLKPVTDEFISRENRRGDFAPGCGAFFLPHFQRALRRISARYAGRPACPPVPIRHSGWRGRAPPGAKISDYMDSSRGHFSSFRRRDAFYHHGPFPGHCRS

SEQ ID NO: 107961 - protein, 193 aa, Unknown
  Obtained from environmental sample
  misc_feature (1)..(193): Xaa is any amino acid
MMAERNRRVCFTLMGEARLYTSGLTYTYNSRRLLLNRVTDVKLMNPDGSLSKLNNKKLYRVIGGLYSCQMLGAVEAHSFGLLKVQPKDENGNPITDYEKHIIYNGDMELKEWAALANYLESFEQSGGVSKIPEYYNRLHGRKIEVTSRAPWAILKKPNKIFFMLLGVIIVVLAIIAVPVFFIIRAIRRAKKKG

SEQ ID NO: 107962 - protein, 122 aa, Unknown
  Obtained from environmental sample
  misc_feature (1)..(122): Xaa is any amino acid
MKWNVEPLPSSDSTPTWPPIISTMFLEMASPKPVPPYLRAVLLSACWKDLKSICCCSLLMPMPVSVTSTRTTQPSSLRSTRRVCSDMAPFSGVNXTALLKKFMTTCANRWSSPMSIGGMARS

SEQ ID NO: 107963 - protein, 307 aa, Unknown
  Obtained from environmental sample
  misc_feature (1)..(307): Xaa is any amino acid
MSVKNVAVGVWKVAVTVRLKNVPYPVKRKATVRGTKAEAKLKETELIKALLDEGQGQGQGESSLTAGTVVSTFDKVKVDTFSDAVQLYMEKATAEGKSSRSHRKQLEWISRELGHVPMARLAEQFDAWRKIYNSTPTSRGTLKANGTINLPVTIVKSICNYLVDLEILDKNPISKVRFPKLRQKAREAYLSKEERERLFEVIQQERPYILPIVKFMLQVPCRVSELATAKVDQLKGGIIFIPKSKNGDPLHKPIPSDMAGYFNSIPDGCEYLFYRESKGKYYPLSNLKNPWNHCPKLAGFLTCTSTT

SEQ ID NO: 107964 - protein, 100 aa, Unknown
  Obtained from environmental sample
  misc_feature (1)..(100): Xaa is any amino acid
MGFVHIVGNFGKNDFFLALLGGFNVEFAPDKKFAPSRLVSLDNPLSAQNYPACGEIGALNKAHQIVVGKRGIVDISADRVANFAKVMGGHICSHTDGDSA

SEQ ID NO: 107965 - protein, 131 aa, Unknown
  Obtained from environmental sample
  misc_feature (1)..(131): Xaa is any amino acid
MERNIPRTVVTVLSILPKTYIPTFQNPRFLPLLSLAQCISVIFSVYWANLFRCSVVAELVLLYESPAPPPPPPPPGPPPPPPASLAAPATSERAFFTRNPLPIGRLESVVNNPPIPMFNDLESVVVCVTSL

SEQ ID NO: 107966 - protein, 306 aa, Unknown
  Obtained from environmental sample
  misc_feature (1)..(306): Xaa is any amino acid
MDQIGRVFFCIFRHPISRKAGSAKWQRTFPACPFQAFYADVSQAVGANCVSDSVQVQFVGDQCVFAVNVYPIVARMAEGRRRDPHVYFFCAGCLQAFDDSRAGGAAHYRIIHQHDLFPLHVGRQRVEFLPDGSVPLCLDRIDEAAPYVPVFYKARHNGYSALGAEAAGGYQARIGDAAHNVCVYGVLLSQNDAHVVSGLIYRKPVHHRVGPGEVHVLKNTQPAVGLLVGEALPLAGYLSTFKDDDFARQNVPHNFKSAYVQSAAFGGDCVAXFIFSYAERPKAVGVAHCHQFVVAARYDKGESALQ

SEQ ID NO: 107967 - protein, 152 aa, Unknown
  Obtained from environmental sample
  SIGNAL (1)...(37)
  misc_feature (1)..(152): Xaa is any amino acid
MKLFHSLRFRFAFIFSVFIIILSVSLSLLGIRQTTKAASDVFSAQGIAIVEKAVSFVDGDSFETLVKSLDKNDPFYEETRVKLFELKELSGCRYLYTMSQVDKNIWQYIIDGSGDPEDTENFSDIGEKEDTGAYDNAFRRALVSGKTESGNL

SEQ ID NO: 107968 - protein, 178 aa, Unknown
  Obtained from environmental sample
  misc_feature (1)..(178): Xaa is any amino acid
MKRGSFHGYSPYRDVFKRLEFHICEKAGKVGNNEGVPEVGLVSSVFEHRFGVGNSYERQWAYHFIRERFKNAVHYRFRHMENIFLIRKSHFKIKLVKLSGRAIGACVLVAEAGGDLVIAVKARNHEELFENLRGLRQRVKFAMVLAAGNKVIPRPFRRGRGKYRRLNFNKLKLFHLCS

SEQ ID NO: 107969 - protein, 188 aa, Unknown
  Obtained from environmental sample
  misc_feature (1)..(188): Xaa is any amino acid
MVIRQRVLHALGFVGNHGKRRYLAACSGGGRYRDKVGLLSHFGEGVDPLADVGKAHGHILKIRLRVFVEHPHDFSRVHSRTAANRDDNIGLESGNQSRASFGAAQGRVGSDIKEGFMDNAHAVQFVGDALGVAVLVEEGIGNDERPLFSHNVFKLIQSHGEAAPFDIYLFGSAEPQHIFPPCRQCFDI

SEQ ID NO: 107970 - protein, 123 aa, Unknown
  Obtained from environmental sample
  misc_feature (1)..(123): Xaa is any amino acid
MAPPRNAAHDVPRLFWQRLRGHGGREARRAAPLGGHKPRAGRGQKRPHRSHQVGGQNGPHQDRRDPAEHEAIPRAAGGRRRHRPPRRPGEGLLQDGRAPRPVQRGGRGDAARGPADPQGHRDR

SEQ ID NO: 107971 - protein, 169 aa, Unknown
  Obtained from environmental sample
  SIGNAL (1)...(20)
  misc_feature (1)..(169): Xaa is any amino acid
MKKIALVLVVFLMAATLVFAQAKKATPAPAPAAPLPVTGKLTVEIFDRGSDGGRTLAHNNAWTKWVQEKVKKDLNIDVTFVPVGRWSENTDIVNLMAAGTAPDLCYTYNYDMIAEFRDKGGIFDLGPYIESYLQDFKKLQGADTSIPGKDLVYRDQDPNTLKVYSLRNM

SEQ ID NO: 107972 - protein, 165 aa, Unknown
  Obtained from environmental sample
  misc_feature (1)..(165): Xaa is any amino acid
MIFVDAIRWHGMNFFLWAIGVSSVLSWVEAGRNFSGILHIIFIMLGLEVYSAFFSNIYHYFLKPVLIIKAEEKLRLMLYKKAKSIDLSCYDDPDYYNDFVLSVSESKQAIERTIQLIDKTVTGLVMVFSYGIFFILKDPVSFLFVLVSFLARFIFGKVISKMDLK

SEQ ID NO: 107973 - protein, 210 aa, Unknown
  Obtained from environmental sample
  misc_feature (1)..(210): Xaa is any amino acid
MNKIPYCLRGIAPAPQTRDCGHTGIVPAGNTLVLYQLKQPAFAHNGMAQVKAGKLYLPRWKNLSLADKPFVQGPVYLVLKRTERMGNAFSRVGQGMLEIVHGINAPGVTCTVMCFTADAVHDGIAHEQVRMGHVYFCPQGSCSVREFTCAHTGKKVKVFIYGTVTVGAVLARRRYGYVVLILNSGSSVFTHLNIGKIVNISFSLFDDFYS

SEQ ID NO: 107974 - protein, 189 aa, Unknown
  Obtained from environmental sample
  misc_feature (1)..(189): Xaa is any amino acid
MAADPQRTHRHPAARNAGRVRQKTARSLAGRDCQPHGRQLPHAQGGRQGPRTDQRLQGRAADGFRPRSLGSVFHPCPAYDRSGPQLPGTAQENKQGRSVRNTRPRRAGRRARLLHHLLRRLERARPGGDLPGFGSRDQRCAHPLRPGRPRRRTRPRPGRQGRQRAGLYALRVGNAQRNRRPLAGLHRRL

SEQ ID NO: 107975 - protein, 197 aa, Unknown
  Obtained from environmental sample
  SIGNAL (1)...(59)
  misc_feature (1)..(197): Xaa is any amino acid
MIAIALTSRRFRWTTYSFILPAIALTGARLSVIFTHVTISAVAFSLSAVTAGFFLTALAADFLATALPAIFAVTEIPFTPILSATFVVTAFPVTPTLSITLVGTVFLVTLTLSTTLVVTAFPVTPTLSITLAVTAFPFAPTLSATLAVTAFPIAPILSVTFVVTVFPIAPDLIVTFATGAFPVAPTLSAPFALAASI

SEQ ID NO: 107976 - protein, 105 aa, Unknown
  Obtained from environmental sample
  misc_feature (1)..(105): Xaa is any amino acid
MYFWLSPLYNNWMPSLRLTAKEKQEDGRYRKVYEKQLRTPYERLMASXDVSLECKAELERRRSEQNPVELNRRLNEAVQRLLKINREKLYAKKTSCQGDGQAPAA

SEQ ID NO: 107977 - protein, 321 aa, Unknown
  Obtained from environmental sample
  misc_feature (1)..(321): Xaa is any amino acid
MVVEVERRFNRSERYMRVEECPDRPDILPITRKRVGVDVAAVYRRRDNLLAEVVVVAELLQNVYQYLPVEEIDAHGTHVRPLLLAPLRLLAQLRRRGEVVYLRVVLGLLHKVEHLVVGGHLEYAELPHLRTGHGDDAERQIGLVLVVEVDELLEVHPVQMVAGEEQNGFAEVFEVAEIVAHGVGRPLVPIRALAGLGGGQDRDEALGKVVEPVSLEYVPVERFRGELREYPDVPDPVVEAVGNRNVDQPELPADRHSRLRARGRKGGQPTPLPAGQNNRGYAGIAHSPVPFDSFVFFIKTEGRGFEPPVGLPLRRFSKPVP

SEQ ID NO: 107978 - protein, 198 aa, Unknown
  Obtained from environmental sample
  DOMAIN (1)...(80): OB-fold nucleic acid binding domain
  misc_feature (1)..(198): Xaa is any amino acid
MIGQLTALRETHDKNGEDMAFGTIQDFEGDIDLVFWAKTWKESRELLNLGEFVALKGSLDPERDRNPQKPSLKVSKVDDLAALSRSAARKADAGEHPKLPPMETQTAIKQNSPDTEQSAPPLNEIHVRLESGAADRDETIQPLRNYLNGNQGPCPVFIHIGEKIIRTNKGLSLEAEKEALGVLEGCIGVAQSWKEQCK

SEQ ID NO: 107979 - protein, 110 aa, Unknown
  Obtained from environmental sample
  DOMAIN (7)...(61): Helix-turn-helix
  misc_feature (1)..(110): Xaa is any amino acid
MTINERVRQIRQALNMSQTDFSRAICVSGGYTAEIENGHRIANDRIIRLICLTFFFNETWLKTGAGEMFQSAPAEKRERILSLFNELNPQFQDYAMAVIDRLLQLQKEKP

SEQ ID NO: 107980 - protein, 122 aa, Unknown
  Obtained from environmental sample
  SIGNAL (1)...(44)
  misc_feature (1)..(122): Xaa is any amino acid
MTTNSFAWRSPIATAVVWSSTRSSMYMFPSTFPKTNAFCALISASTTPVSPTVIDSAVWIRPLYEPSMRMLWGTLIVPSKTLPVPIMFKRPFPFLSMTTLLHCLCAPMKSIGSTYFPYFMIS

SEQ ID NO: 107981 - protein, 260 aa, Unknown
  Obtained from environmental sample
  misc_feature (1)..(260): Xaa is any amino acid
MRLENTYIGWNFATIWAMDYESQSYPYLGMIRAPAPVITKHPADDSVGIGAKSPTLSVTATASGIISYQWYSNSVPSNKDGVKIEGATNPTYNPPTNEESRTFYYVVVINTSTVTVADSLAGRKTASVASNPAKVKVGKPFDAVLSYDRVVPLADNNKESASISPVQKPTANFTAGPNPVNKGGVITIFHKGKRIVGGDLFIYDVTGKLVNRIDVSRSKYTWDLTDKKGNKVPEGTYVIKGVVTGSDGKREKVSVLAGVR

SEQ ID NO: 107982 - protein, 129 aa, Unknown
  Obtained from environmental sample
  misc_feature (1)..(129): Xaa is any amino acid
MTTSQFSRNFRQPTLVWGPRDLSGPGSSHYRSRPAVLEKKEAGGETAQARREAAARRRPYEQAAAEAEEKLAAQADRRRELEKLLADPATYQDRARARQLNQELAELARAALALEAQWEEALAKLAELE

SEQ ID NO: 107983 - protein, 236 aa, Unknown
  Obtained from environmental sample
  misc_feature (1)..(236): Xaa is any amino acid
MRPHPGTGCDPTDPPNRFSYSDCPRPRPLAGFRREPHRPLAAAGFPCAALRPRPPPASASPHSDGSRRCGRAHPARRPLSRRLFAARLRNFGEPRPCGQRHPALCPQSRRSRRRRPHAARSRNFCGSDRCGLRYLQSARQNAVCSAHRGSRRILRPLCACALPGPQATEPFQTKRQVFPSAPGVRPVHAATGTKAAQPRGGSTPAGCFRQRPCAARPASDPKARGPCRATESRYDP

SEQ ID NO: 107984 - protein, 172 aa, Unknown
  Obtained from environmental sample
  misc_feature (1)..(172): Xaa is any amino acid
MSVHKNKRGLSKLEFYHNARRLRKELTLLTLRDFGIHSRGAKFKADTGSQQEVGFYDEVIAEFSESIRNLLRNLMLNITAGNTIYPTTHEELATRRMYQNGAIVNCQQLHQEILYCQDIMPVKASVFMPYIEKIEFEEKLLKGWRKWNNKRAKEIDAKKFSGGAKEEEEKEE

SEQ ID NO: 107985 - protein, 209 aa, Unknown
  Obtained from environmental sample
  misc_feature (1)..(209): Xaa is any amino acid
MRELRAQGAKFPIKMLMTYNPNVASWPLEVQVVAQQLVELLGADYIEPVIETGPSTNFLAEIRRGGKYAFLKGNNGAVAPEDPESWVYAFQPGLNWNFIDKGTGAETQATYARYVELVDKAKAITVKSEARYMAFAEAEAFLLSHAFVVPFCTDTDGYMVYRYDLFDGYGQGGYEGRKVLAEPMTGEQWKLLYADWQAGKQEALRNSTK

SEQ ID NO: 107986 - protein, 145 aa, Unknown
  Obtained from environmental sample
  SIGNAL (1)...(22)
  misc_feature (1)..(145): Xaa is any amino acid
MRAYISFFLLPSFLFFLLLRLSCGTKHVLVFVGVEFLKLVAGRPQDVAGIELFGFFDQHLADNGGHREASIGVDVDLADRAFRRLAELFFGDSHGVAQLAAELLYHMHILMRHRGRTVKHDGEARGVSFQFLQECQNAAGGDSAI

SEQ ID NO: 107987 - protein, 104 aa, Unknown
  Obtained from environmental sample
  SIGNAL (1)...(71)
  misc_feature (1)..(104): Xaa is any amino acid
MPNCLFVSFISRSNSSFCFFISCSNRSSCSFFSRSYRSSCSFFSCSNRSSRSFFSRSSRSSCSFFSRSSRSSRSFFSRSRRSSRSLISRSKRSVFTRLIARTFL

SEQ ID NO: 107988 - protein, 149 aa, Unknown
  Obtained from environmental sample
  misc_feature (1)..(149): Xaa is any amino acid
MLFNSWNVSRLHIDLVNYRHYLKIVFKREVHIGQSLRLHALSRVHKEQGTFAGINSSADFVTKINVSRRVYQIEYVLVTVLRRVGQGNGLAFDRDAPFPFNIHIVEYLILKIAVVHKIGFLNKTVGKRGFAVIDMSDNAKVTDKLGLCH

SEQ ID NO: 107989 - protein, 116 aa, Unknown
  Obtained from environmental sample
  misc_feature (1)..(116): Xaa is any amino acid
MNGSMPETKDAVTLHDLLIDVLGTKFSITTNEAPEFLDEVLVQYQAALENTQNISGMKDNLKISILTGFLLCAEINKLKIQIEKEQTDIEQEINRITRNLIDSIDHVMEEIIPINE

SEQ ID NO: 107990 - protein, 193 aa, Unknown
  Obtained from environmental sample
  misc_feature (1)..(193): Xaa is any amino acid
MPPTTEWMHAVSGLFHSHRWVLFAFPSRYCALSVIGSYLALEGGPPVFAPGSSCPALLVSRPPANPSSKGLSPARAPLSSGLQGLIHRIMPAYPASPRFGLLPLRSPLLRESRLISSPPGNGMFRFPGFAPASLRVSGTKPEGLPHSDSQGSLAGAPRLGVSPLPASFVAGRCLGIPRVHLFVLLLSTHCQIR

SEQ ID NO: 107991 - protein, 282 aa, Unknown
  Obtained from environmental sample
  misc_feature (1)..(282): Xaa is any amino acid
MYLIAQVAGQVLGLAHCKEVVAYDHQRHPGRPQILLRPCVDEAELRDVHGAPHYVGGHVADVGFVGLGEFVPLRALDSVVGREVDKSGVRAHLQLGGLWQAGKLFGLCGRRLADFVARHQPGLLVRLFRPVARRHIVGLAVRAQQVEGDHGKSEVRAALEEQHLVVVGDAHQLLCEGYGLFVDCVVFFGAVADLHDGHAGAGKVQEFVLRPFERLHWEACRAGVEVDGAIGHWLPRWWMGVWDALAGAWRRGATLRSRSVSPPLRPLCAPSSLSCWRPGAAP

SEQ ID NO: 107992 - protein, 205 aa, Unknown
  Obtained from environmental sample
  misc_feature (1)..(205): Xaa is any amino acid
MLNILKGLFMGKYITPIAMLDKCLVKNGVDDKIRQKIVGQGENIKITNKPEIIAEACFNIMTVMDELLDEETKKKVREDCACCLGGEQNKKCREVNKKYESSEERIKAINETNSGFGYGYKITEKGKYEITFYDESAPYYRKCVCLGMRLNSINKKWSKTWCYCCGGHVKHHLQTILGKKVKVKILSSALTSMGKRGCHFELKEI

SEQ ID NO: 107993 - protein, 142 aa, Unknown
  Obtained from environmental sample
  misc_feature (1)..(142): Xaa is any amino acid
MGGSDILFKGSYLEYLPLNKIAKYQDGPPKDSVSFSGYPQQHRTEKNKLILVYEPLGEDPALLEFKIDDILYVEDVPQAVTENGEGIPLAKLWLRRGARGMLLEPFEVDGSLHFLELRREQQGRFVNKQSGKSGGYPNGVRL

SEQ ID NO: 107994 - protein, 248 aa, Unknown
  Obtained from environmental sample
  misc_feature (1)..(248): Xaa is any amino acid
MGMKEMFLSNGFNDYLSKPIEVLKLDYTLAAWLPAEKQIQNLEEQETTEAKSVFPDGFLAEGVDIATGKTRYTEKAYLEVLRSYYLHTPALLEKTRKLNYRDLSEEAIKEYTITVHGIKGASFGICADTAAKQAEALENAARSRDMDFIEANNNCFIEEVEKVFSELKELFSLIEKQAGAKPMSQKPDPDLLERLTKAARHYNVKVMDEILEKLEKNEYEQGGELVKWLREQVDNLEYEAIYKKLEEQ

SEQ ID NO: 107995 - protein, 117 aa, Unknown
  Obtained from environmental sample
  SIGNAL (1)...(53)
  misc_feature (1)..(117): Xaa is any amino acid
MLLRNSLERFTIVFPFHFITRRFSRVTSAITTASRFSASASSINFFASFSAVTTDILSWLSLIASSVPSSPSYFFVTLSRSIKSPSASSPTETLTPPAPKSLQRFIRRAACGLRKSL

SEQ ID NO: 107996 - protein, 135 aa, Unknown
  Obtained from environmental sample
  misc_feature (1)..(135): Xaa is any amino acid
MRQSTVPHIGCRKHRPFRVIVRGGSGPMCRRKLVRPGVHCVAHIVKAAYAATHAEGNKNLIGDFMYNLKQSRAALVRSAYVKESKLVGAFVVIAAGQFHRIAHVPYAFKFNALHYPSVVNIQTWNYALCQHFNYP

SEQ ID NO: 107997 - protein, 253 aa, Unknown
  Obtained from environmental sample
  misc_feature (1)..(253): Xaa is any amino acid
MAESPNHVRRAPVGRCLPRYRGVHLVGSFSQKILKILTLTSEDSMITRVIVLLTLSIISAMWMFVDCSKNNSGTGQLSAQELALLSEIESSATQSTQESTPPPEQESAPQLAQASPPAAPGQSEAKKKSAKTGRDTVEIREKMFIAQTNDIYINKDDYLGKTIKYEGIFDQSTWRNNGKTYSFVIRFGPGCCPGDNSAAGFEVLWDKAYPKKNDWVEAVGVLEEYDDAGIPSLRLALTSLKVLTKRGKEKVTQ

SEQ ID NO: 107998 - protein, 124 aa, Unknown
  Obtained from environmental sample
  misc_feature (1)..(124): Xaa is any amino acid
MDTRRGGRGRPRDSERRDCRAGNREAGGRERGQRDRGSEPDSERRRVEHLLERQQGCQRQAGGVHHGRQEDRGDKCKRHEEDRRLEHSRSERRVVPRKGRPDDERRREGEGFDGRGSGEVTWLA

SEQ ID NO: 107999 - protein, 135 aa, Unknown
  Obtained from environmental sample
  misc_feature (1)..(135): Xaa is any amino acid
MLCPLKPLNVDYCSLYAVRHFKGSVPHFLRLFAENRIEQFKFGRCLRFVLRRYLADQYIAVAHFRAYADNAFAVKIIKAFFGRVGDVASNFFGAELCFPYFNAEFFYMNGRKHIVPYDXFRDKDRVFVVVTVPRA

SEQ ID NO: 108000 - protein, 198 aa, Unknown
  Obtained from environmental sample
  misc_feature (1)..(198): Xaa is any amino acid
MPVDAIDGPDKSYFKEISDKPGLRIFIPAASKNPEAALRYLNWLCKFENFNFLQIGEPGRNHDLVDGIPKAKAATGPWIMNSANNIDITMPINGIELLSAEKNARVLALNYGNTPPADIVNAYNISISKGKAPAVFVATETKLPPVSQTLKDKADALIAQSITAPTARFDSVWDTGYRDWLSSGGQDVINERSTLWKR

SEQ ID NO: 108001 - protein, 220 aa, Unknown
  Obtained from environmental sample
  misc_feature (1)..(220): Xaa is any amino acid
MGKFMAGKLGVVGFDVHAKIFFKTPLAQEAYNSFRVKIVLVFGRLHRFWFNIEGALKALFAPIIPRHGKETGKIFFFFFKVGIEQAHVAFAPAPEGIALAAEFNRGVNGRFYLGGGKRYNAKFRVGSGAVHETGIAEYIRRSPQQFDAGGFLKFFCLGYQREKIFLAFGGGGSFRRDIPVMEAVQTRAQLGKKFKRGIHFMIGGFHRSLRVFAPGMAMGG

SEQ ID NO: 108002 - protein, 178 aa, Unknown
  Obtained from environmental sample
  misc_feature (1)..(178): Xaa is any amino acid
MIDWPSWTRIFGDGRTADGEKPQALRAVHHFNVAAGSGAEVGVQRGEDHDGRAAALRGIGTRAARLYGAYHLYAYRLYAHRGGGYHRRARRYQKTFQREARSVVAALLRQEQDGAGRSRGYQAVAGEFGFRARQGERFFDARSAQVIRIGMEEVSRVADGERALRLHPRRHRRRRVRV

SEQ ID NO: 108003 - protein, 276 aa, Unknown
  Obtained from environmental sample
  misc_feature (1)..(276): Xaa is any amino acid
MFLLLLPILSFSCQTQQPVQPRRHRFLSRPADRGVTQLPPRSRRLPVVVQTRPVHLQHLRRLRHRAYKIDHGVAANSLRPAERQAGHGADVVFKLTRPRPVYRPMPGVVDARRHLVRRQFAARVKEFQSQNAHVVKAFQQTARQPLRDRLHRVVQTANSMTENTAGMRVLADRIERFFTAATSDGHDAYFPCKGDERLQNARSAVRPRPRRFYIFAGFYDRLALPVVPKRARLEHRRQPDLTYRRFQSVKSIHCEKFRRWDAELDKETLLRESVTR

SEQ ID NO: 108004 - protein, 170 aa, Unknown
  Obtained from environmental sample
  misc_feature (1)..(170): Xaa is any amino acid
MRIRKKIRNEELGVRNKENQEGSFVPHTSPSPIPNSSLLIPNLFNRRFYQAQKQRVRFIGAALELGMKLNPGEKTAIRKLNSLDKAAVRRHAADNHSLARQSFPVVIVEFKAVAVSFAYFIRAVQLVQQRALRDFTRIRAQPHGAAGADHAGLIRHQVNDAMRGNLVKLA

SEQ ID NO: 108005 - protein, 214 aa, Unknown
  Obtained from environmental sample
  misc_feature (1)..(214): Xaa is any amino acid
MLIGDYIDGTDLVAGSLNVPWNNTYKNTRMVLSGFNQYKGSGDTETRKNHFLFTFRDCPLSRRMNATNTNADGYAATEMRSFLEGDFKNALVAAMGGDFILPVRRLISISDSSWNWETDTVFLPTEYEVLGAPVWSKVGYGGGFQCQFPIFQNSCEYLVKRLNGSRTSYWLASQYAGSSAAFVSINYYGLSYNSGSASSALGCAPAFCVASRHE

SEQ ID NO: 108006 - protein, 259 aa, Unknown
  Obtained from environmental sample
  misc_feature (1)..(259): Xaa is any amino acid
MHADAIVIRLNVEKYRLPDFSLRMPAVQCFQFPLQRFEKRFGARVVPAIALPAHALTGIRTAFPQNVAEGLGAILYAPVRMEYQAALRAPAFDRHFQSGNAGLRSLHAKAKRPAYCFSVVQVKHYGQIHPAVCRAQIGNVRNPLCAAGFGIKLPGQYVFKDCKGMVGVRRRDMLPAFSRVKAVFPHQAGYFLKADPFSVGIAKFPAYPRAAIPAAVLRRYFQNKAYQLRIGCLPPLRCPSPVPIGNRRCGLPQKARPSP

SEQ ID NO: 108007 - protein, 278 aa, Unknown
  Obtained from environmental sample
  DOMAIN (51)...(235): Phage integrase family
  misc_feature (1)..(278): Xaa is any amino acid
MSRSPKSASGRNTIIQQGTIPLAWAFQKEMIEKDIVSGIIWFSGKAKERQILSPEQAKTLFRVNWKDERSRLANMLAMVTGMRAGEIQGLRIQDLGQDCLYIRHSWNFQDGLKTTKNNETRIVEVPFPGLMRELIEMAKSNPHGQDMDSFVFWAEKFPNKPIEQDIFRRDLKAALIKTGLNEESAKMYTFHGWRHYFTAYMRDKVTEKLLQSQTGHKTLSMLDHYAGHKITGDRERIRQAQIEMFGGLLPDTAGTLLKAGGLTMIENTSKSEKGKTNC

SEQ ID NO: 108008 - protein, 112 aa, Unknown
  Obtained from environmental sample
  SIGNAL (1)...(27)
  misc_feature (1)..(112): Xaa is any amino acid
MHINIRRLTMKRLLFAISIISLCLLFSCGETPETFKVTYYDNGSISEPVVGFTPVDNNQYKSGEYATVLDSALQRTGYDFGGWSTKQDGSGTPYNTGDKIKIENKNISLCPR

SEQ ID NO: 108009 - protein, 162 aa, Unknown
  Obtained from environmental sample
  misc_feature (1)..(162): Xaa is any amino acid
MGGRVRRRRSRDGRQERWQRLDLGIELKRPTGRRRHHTQERPRPCGLRCRRGDGREPEQGDGGDNGGRPGTAHCDCRAKQRDLQIRHLVNQQQRRGDGVGQRPRHNGERGHGDDNGDDPAGRQDGAVRCHGDAGARDWREPRQNNDDAGGVKPGAVDGHHPA

SEQ ID NO: 108010 - protein, 192 aa, Unknown
  Obtained from environmental sample
  misc_feature (1)..(192): Xaa is any amino acid
MGGADVRLEGLQARALQRDRAGLRGRDGRDRRRPDLAGGRGADRRGEGAVAAGRHGAGLGRVLPVRGWGRAGRGCRRDGRDPAGRLGSRPRGGRDDRQGRAGDGLHRPEALPALTISRLSGDPPSPWEVEYGFSRVVRAGPFVTVGGTTSVDELGFVVGVTPYEQAVEVLRKLVLELARGGASVADVVSSRA

SEQ ID NO: 108011 - protein, 152 aa, Unknown
  Obtained from environmental sample
  DOMAIN (31)...(70): Pentapeptide repeats (8 copies)
  misc_feature (1)..(152): Xaa is any amino acid
MKITKNLARTLKNCLGKDWRQKVRDLNFRGANFRGANFRGANFRGANFRDADFRGADFRGADFRGADFDNYEKIHLIALANACIYPLNITLQILKEAKEKTDVWKQNKTPLLRKCDDYDACESGWKKAFGSEDYVITENELHAFWFFCWRAE

SEQ ID NO: 108012 - protein, 159 aa, Unknown
  Obtained from environmental sample
  misc_feature (1)..(159): Xaa is any amino acid
MPVSAVGSGAADILSNIPQGSNIREIKVTGLIGGTAAKPAVNLGTGDMAGGIAGTAKETVKEDIEKQTAAIMAEAEKQAQTIRNTARQNADKIRNEANAAADKLEKDAKTPLEKTAAKVAANKLRDEGKANADKIEQEAETQAASIMDAAQKKADELRK

SEQ ID NO: 108013 - protein, 123 aa, Unknown
  Obtained from environmental sample
  misc_feature (1)..(123): Xaa is any amino acid
MEREDVGAGVAEGVRIPDRVGDHEVHVERHGGAFFDRGHNHRPEGDIGHEPAVHDVAVDQVGPGVASGLDLAFQEAEVRGKYGGRDPDFGSCFHIDKYNTRLESKPNSYFKTKKLLLTAFFGF

SEQ ID NO: 108014 - protein, 111 aa, Unknown
  Obtained from environmental sample
  misc_feature (1)..(111): Xaa is any amino acid
MFGGGLHPVHAGAEIDLIEVKLHDLTLGIAALKLDGGEHLAYLTDKGLVGREVKVTGKLLGDGRGALRLLAASKVDEHGAAVAKHVYPPVAVELSVLSGDDGVLELNRNFV

SEQ ID NO: 108015 - protein, 161 aa, Unknown
  Obtained from environmental sample
  SIGNAL (1)...(23)
  misc_feature (1)..(161): Xaa is any amino acid
MAXRILSYGFSALXVYAPESAYAPEDAAQDVFVSLLACKQKPDDIAKIKNVEGLLWTIATNVCLNKLKAKKWKPGEDLTVNEEEMYPAAGDDYKRVDDNLLLEKILEEESEEVRSYVYMHYNDGMGYVEIAKIVGKSKTWVGKKLAAFRERARKELEEDVK

SEQ ID NO: 108016 - protein, 168 aa, Unknown
  Obtained from environmental sample
  misc_feature (1)..(168): Xaa is any amino acid
MSPPRTACMPISVGGRVPEAIPLRPFTTASPYVRPIALAATSPSVRAVPLGESFLKRWCASIISMSNAPPNFSATSSVSEKSRFTPKLMLELTRTGIVSAAFCASSRSLSSRPVVPTTIGSFSCAAVCKLARVDLTDEKSITTPLFTPVSSMDGRIDTPPQSAPMAEP

SEQ ID NO: 108017 - protein, 102 aa, Unknown
  Obtained from environmental sample
  misc_feature (1)..(102): Xaa is any amino acid
MDNGNHNFARKMSKADNGVQPVAEFGSKDFFHSFVYRAVVLNTISKTDKPLADLSRSGVACHYQNYIAEIRLASLIVGKGGVIHNLQKYIEDIAMGFFNFIE

SEQ ID NO: 108018 - protein, 140 aa, Unknown
  Obtained from environmental sample
  misc_feature (1)..(140): Xaa is any amino acid
MDIPINRTRLMVHRFFWGGVMDSYLEMLPLSGIAKYSGNQPKDAVPFAGYPRQHPSEKNKLLLVYDPLGLTPTLMEFKIEDVLFVEDIPSAVTEEGEGVPLVKLWLRRGAHGVILEPFEVNNPIQFANKSREIRERFLGA

SEQ ID NO: 108019 - protein, 130 aa, Unknown
  Obtained from environmental sample
  misc_feature (1)..(130): Xaa is any amino acid
MIDECLKSHPRIKGFEIQTACRESLNTSFTDKIISQSDTDTGIQKLLLIPLLIKKNNPDVAFSPEGSETMNHTIIHLNDEKYHQPIYKVRKDQSLGSKFQVGTTLDNRDKYVEAENGTNLFFAIYADKDG

SEQ ID NO: 108020 - protein, 122 aa, Unknown
  Obtained from environmental sample
  misc_feature (1)..(122): Xaa is any amino acid
MAAAHGELDGGRQGQGRQLGLLRAHGDFAGAHPAAVHARGGDGGRAGGDGGDGGHRHAGGGVGVRXHRGHGGVAGGPDDALVRRVAWQNLGGERPCQVPVEGQPRGGRVDRHAFTSLAEPST

SEQ ID NO: 108021 - protein, 144 aa, Unknown
  Obtained from environmental sample
  misc_feature (1)..(144): Xaa is any amino acid
MQIHVKALLNAIGANFHDVCASNLYXARSRKAQNLEIYNDFSVHQAVLEIVKPDIIIAFHNAGGRSTYNLLIQEYMTKLKQVRQPIFIGRDGSFDQHLTIAEGQYWNKPLKVIGLPHLSYFDPSKYPDVLQKIAEECRKSTAKP

SEQ ID NO: 108022 - protein, 145 aa, Unknown
  Obtained from environmental sample
  misc_feature (1)..(145): Xaa is any amino acid
MAGLHWEADFAFVFFQGEPGPAPAEFLAARPNLILNHIHHLTYGQWQDGAGAPPLVAAGLTITGPDEAGPEPRLIIDPGLAFGFGGHPTSRGCLDCLDLAATTPPRPSTGLDLAASACFKGSRTARLWCPRATGVYCICLAAGEA

SEQ ID NO: 108023 - protein, 127 aa, Unknown
  Obtained from environmental sample
  misc_feature (1)..(127): Xaa is any amino acid
MIMDRVHEHYRIYAVQGALLPLFCDRNDLICGAAHRAVRTFNAVNLTDLAVYVAHRHALGVQGDDLLLYLSCEAGLVLLHQPGFKFTVPIPRNLDLQFPVRGRKALLAMAVAAVVGLFGTVIVLAVA

SEQ ID NO: 108024 - protein, 148 aa, Unknown
  Obtained from environmental sample
  SIGNAL (1)...(24)
  misc_feature (1)..(148): Xaa is any amino acid
MTDSRVFRRYAGGLFFLAAAVFCACTQVPEYCGDGDSPFDFKNQYCQDGVAHPKTPDKPPQTYTLTVNRNPAAGGTTDPADSQTDITAGTSVDISATADTGYTFTNWTITGSGVIASANNASTSVTVNGNVTVTANFTQDPATPKTYT

SEQ ID NO: 108025 - protein, 160 aa, Unknown
  Obtained from environmental sample
  misc_feature (1)..(160): Xaa is any amino acid
MNPRCFVFAIGGTGSRVLRSLTHLLAAGVKPENNNFDIVPIIIDPHHGNEDLQRTARMLDWYKKIKKISNPNGFFSTNIYTLGDLKADNPDSHDEKTTFTFKLRGSGDKFRNYIDYGNMDPENQALADLLFSGSSKDSRGGDCDLLDIQMDIGFVGNPNX

SEQ ID NO: 108026 - protein, 257 aa, Unknown
  Obtained from environmental sample
  misc_feature (1)..(257): Xaa is any amino acid
MPSRAMRAFLELQDAIYVIYSAYAYGEKRRLSAVIRNELELDVIVKEGTSLFEINLDKITGAIAKRIKTMTGKELAGLIAAICLTFLLATLGSKAIDHKAEIEKIKELRTTLTDVQKNTADAMIEAMEAQQSFYRATAYQDFDNLEINGQSFTQEELREMVKIPRVQHPVETKIHSGKYKITDIHLGDDTVYLDVVGIAGGTVVRNVNLLKGVISANDYQWFKDSTAGLEVEMTIVATEKNGEIIASFLQSFSIPNN

SEQ ID NO: 108027 - protein, 211 aa, Unknown
  Obtained from environmental sample
  misc_feature (1)..(211): Xaa is any amino acid
MKINYKIVWLDDQPKPMMKYIEKIESILRENYFIPDIKEPYKSYEAFHRSFENSTDDDVYGEVFNDCDLLLIDYNIAEKQENEQKTGATLISQLRAKGIYTETIFYSNAMEDYRKRNDRAELDNVIYADKNELLNKVEYIVKKSVVQSMIISNLRGYLMDCTSDFDFLCRVISEYYFLRLXNEQQIEILLKAEEYIHNQYESEIKKFEKIX

SEQ ID NO: 108028 - protein, 116 aa, Unknown
  Obtained from environmental sample
  misc_feature (1)..(116): Xaa is any amino acid
MWQSAAGHSTLRVLTEDAPKIEGVEDMRLPPGPVGCSLRHLLHESALKGVCRLLVEGGPTLAAQLLEEGLVDVLHVFRSDVPAGGQTVALDAHKFGRRSVCARFDGGQWERLETGV

SEQ ID NO: 108029 - protein, 142 aa, Unknown
  Obtained from environmental sample
  misc_feature (1)..(142): Xaa is any amino acid
MFFLFQFNFGSRTDIDHGDTAGQFRKAFLQFLAVVIACGIFNLRFNLRDPVLNLFLLAGSVDNSCIVFVDFDSLRLAKLGNIRVLKFKADLFGNNFAACENGDVFKHGFSAVAETGCFYNARCAKFRAGFHNQSERARLGRI

SEQ ID NO: 108030 - protein, 185 aa, Unknown
  Obtained from environmental sample
  misc_feature (1)..(185): Xaa is any amino acid
MFPRGTTRPPCRGPIQCGRVRDGLETARSTCGASAIPTPPGAHVPVGGQRQVAAPKRREGSRNPTAPGKPRQGDGTTESGRLRGPRQGVGVRGLHDAPSEGTQGVSGIQPQRPGPYAGQLRPSTGQGRPPGAGRGRQAPPALRPADAGDVDRHGIQARDAHTDSGAAHRRKRSRGLRLIGMFCEQ

SEQ ID NO: 108031 - protein, 394 aa, Unknown
  Obtained from environmental sample
  misc_feature (1)..(394): Xaa is any amino acid
MRAGNHRPELFYALFKRGAEALLLRLDHLFNIVPPLTDLRKSAAHLLDHNRRQLVQKRLLEPDLAPEAVRPPQQPPQHVAAPLVCRERAVSHREDERADVVGDHAKGRARDAAVVGDPRLIRKRPYDRLEDVGIVIGIHPLYHRDDALEAHAGIDVLRLERIQRPVLLAVVLDEDKVPQLAVARVLAVYALNRIAVCGCPRSLVADVVVYLRARTARTGLAHLPKVALVAEAHYPLVRDVGLALPNLLRLAVXVVDGGEEARLFKPPHLGQQFPSPPDRLFFVVIAERPVPEHLKKSVVIVVAPDLLEVVVLPGDAHTLLRVRGAAQSFGVVAQKYRLELIHPSIGKEQRRIVLRDDGRAGDERVAAISKKLNVLITDNVCCLHICLTSLFLIL

SEQ ID NO: 108032 - protein, 148 aa, Unknown
  Obtained from environmental sample
  misc_feature (1)..(148): Xaa is any amino acid
MPLIRSAEVSPHIRLQSLTLNFRYILDPVPAGIRLPMIRFSFNPLNISVLPSTAALESTFVVSWKDAALRNDSVVIEAFVIPSNSGVKVAGSPPSANTFSLALRSSLRSTSSPSKKSVLPSRSILTLRSICDTITSTCLSLIVTPCKR

SEQ ID NO: 108033 - protein, 252 aa, Unknown
  Obtained from environmental sample
  misc_feature (1)..(252): Xaa is any amino acid
MGPPLEYPLSARPAYSDSALFIASAAIFLRGRTIVAAPNLKASPGMPHTTLEASSCTIVYAPASFMASSPLAPSLPMPVRIMPTAFAPAYWATELKSTSTAGRWWKTSGPSLSSTKYCAPDLLSTMCLLPGARSALPGITRSPFSASLTFISQVLLSLSAKDLVKYSGMCWTITVPGAPAGKETSTSFMASVPPVEAPMAIILLVVLVMARRLGGSEAVAARSLIISARFLMSTIAAAFIFCISISDMSPTL

SEQ ID NO: 108034 - protein, 106 aa, Unknown
  Obtained from environmental sample
  DOMAIN (8)...(89): Nucleotidyltransferase domain
  misc_feature (1)..(106): Xaa is any amino acid
MVNLSERIDIIKESILKNVPAKYIYLFGSYAYGNPTEDSDIDIYVVTPDNINNFSEIYAKIIGDLGDKKIFFIDLLFGKETIFNTRKKDNIFEKTISQKGKLLYEQ

SEQ ID NO: 108035 - protein, 101 aa, Unknown
  Obtained from environmental sample
  misc_feature (1)..(101): Xaa is any amino acid
MHTNGTWKNAEAPTAQSKQRRAKANLEAYGKADGKAYRKAYRKAYRKADRKADRKAYRKAYRKAYRKAYRKADRKAYRKVRSWNAPNTSKVCTNRALRSNR

SEQ ID NO: 108036 - protein, 184 aa, Unknown
  Obtained from environmental sample
  misc_feature (1)..(184): Xaa is any amino acid
MLIFTLYFFFKFWIIFLMAFVCKTKNTHMRHGVKPCSLYIFGNAGAQENFPVSRIMREGFSPSGGRNEERKKQDESILSLSSFFPFSFFSFILYNSLTQKMPTAFFANDLGNRAIGQSGNRAIGQSGNRAIGQSGNRAIGQSGNRAIGQSGNRAIGQQPTANSQQPTANSQQPTANSQQPTARL

SEQ ID NO: 108037 - protein, 191 aa, Unknown
  Obtained from environmental sample
  misc_feature (1)..(191): Xaa is any amino acid
MFWDEPHFIFEKTNPALRACYCKHCSGTSRQASLISFLAFLTEEVHKLGKRNSVCLLPPWFPAGLENWNEVAELPFVDEVGSDPYWEKGDTLTKVQESYSEVSARIAELAKKYGKEAQMWIKNYHIEAGTEHFITESTQIASDAGIKNIFAWSYLGSKYMDFLRSENPEEVWRTQIKAFSLAKTWSLEPRV

SEQ ID NO: 108038 - protein, 191 aa, Unknown
  Obtained from environmental sample
  misc_feature (1)..(191): Xaa is any amino acid
MGAVEDFSASTIDRQLSLIAGTSTDVVPAALTIVPLDLSADTGLLAPILASLRIFLLSVDLISFVLILFALIPIPIELSAGLLLLLVLIPTLPELLRLRELSTTPGRLSTPFALIPTPTELSADFVLLLVLIPTPLVLILLALIPVSTELSIGLALLLVLTPTLPELLTPRELSTVSCLFLIPISTSPRIF

SEQ ID NO: 108039 - protein, 113 aa, Unknown
  Obtained from environmental sample
  misc_feature (1)..(113): Xaa is any amino acid
MIHGRSDGETFGLAIAEFSVKNKPIITWAPTFFRNTIFSLKKFKRYLLNRPPIYYEAHLQYLGDKSIKYTCKEDLKEILCDFKEKYLQKINYDCYSELFSEENVMRIFQNILS

SEQ ID NO: 108040 - protein, 181 aa, Unknown
  Obtained from environmental sample
  misc_feature (1)..(181): Xaa is any amino acid
MSSRSLQQTKHILARHAVLPRGDLKVEAELLLKNAVDPADLLLLPQLIVVLSRGTPALGRAHSGGKRPTLHGALLCGAPLAFQHQLDALPAALTAPWAMINCHSRSPLNSLFYRTSFKASKGFLFINDGGRICRRTCRRLHHERTNASRLILGADCAWDSSNRSLGRYPCGVSPCTRYTSI

SEQ ID NO: 108041 - protein, 149 aa, Unknown
  Obtained from environmental sample
  misc_feature (1)..(149): Xaa is any amino acid
MDVFFSLEYSDMGNDFLLYGIEPEFLLENPDMGDIGMTKLLRRARDAGAFIIHAHPFLQAEYIDSIRLVPSLIDAVEVVHGGGGSGKEFTRRNMFYAEEYGLLKTGGTDTHHFNIEGKLTGIAVERRSENIFDLASQIKAGKSRVLEPV

SEQ ID NO: 108042 - protein, 172 aa, Unknown
  Obtained from environmental sample
  misc_feature (1)..(172): Xaa is any amino acid
MRRGRRISAFKRDRVFCAVDREITGRGRRGRGEAARTREGGKGRGGVKRNNFVNGAAGPPRRRTGNGGAFNRAVPAAAARAVQPDGIDPRREDGCRRARVRGARKGVMGGFRSGERAVGSVAEGGFFKMREIIGDKGFEQELVFVVQVNHFPERALVPAVIPVFCGVKNRGV

SEQ ID NO: 108043 - protein, 137 aa, Unknown
  Obtained from environmental sample
  misc_feature (1)..(137): Xaa is any amino acid
MPIELAAFQHQSADNIAVAAQPFGRGIDHNVRAVGYRVEEVRRGHRVVHHERNPVFVGYGRNGVHIQQRRVRVAYALNEYRLGIRFDLLLQFLWIQYVFGVIEMDSESGVDHFEAVGAAAVEVWRGEYPTAAFGEGQ

SEQ ID NO: 108044 - protein, 296 aa, Unknown
  Obtained from environmental sample
  misc_feature (1)..(296): Xaa is any amino acid
MKMAVGGDISPPDGVALRWIGGTKMPVDLVLSGNILNWRALTSSLGFGWPAISHADIAVSAGMDTKTITVRSLSLKTRQSDIEVSGKINLAGARPRLTLGVKSRNIILADVFPNLYRGGWVRPNRPLNAFKDTPLYPELLSAFDMDLTAEVGNFVPYREMGFSDMAVKLKIDDGRGILESGVGYMGGYVATRASITGDGGVMRVRLAARGRGVSVGDLMESLRQAGYIPGLPADTDVYVVSRGRDLSELMGNLTGLVLVESGGGRLRARGFDGGFVWPRLSYVDSREPREYMARPI

SEQ ID NO: 108045 - protein, 107 aa, Unknown
  Obtained from environmental sample
  misc_feature (1)..(107): Xaa is any amino acid
MVWPENERIPVSSRFLIADARVYKRVYYIRNQNAREGQHGGQHGESHDGGVIAVEDALKKELSDPGQAEDAFDDDAAGDQCGDQAAHEGYNGKEGVAEGVVVQDPAA

SEQ ID NO: 108046 - protein, 145 aa, Unknown
  Obtained from environmental sample
  misc_feature (1)..(145): Xaa is any amino acid
MARETSTPRASGQTAAGKAPAEDARGRALSGGGAPPHRRVREGRGRLRAGRGQRQAQPLRHYPRLPPRPAVALGDDEKVRNDLGPVHEQKQDALRGRHSGGDGHPRRGHRFGRGDAGRRRPDLGQARNDHPRTRFQDGVRPFGRY

SEQ ID NO: 108047 - protein, 100 aa, Unknown
  Obtained from environmental sample
  misc_feature (1)..(100): Xaa is any amino acid
MQCSRRYWDAQHVVTEGPEQVLFDIVYRSLAQGYRGRDVYQVAPHQDDVRRLHRHVGAASYGYADVCLRQRRRVVYAVAYHRHFAAARLQLLYFGGFVPR

SEQ ID NO: 108048 - protein, 160 aa, Unknown
  Obtained from environmental sample
  misc_feature (1)..(160): Xaa is any amino acid
MIRSARGVAARQVGEKPFYPVQSILVIFSNISHYPAFAGVHFRTAQSLHAHAFACHGSDDFWTCYEHIGGVFYHNHKVCYTGAIDRATCTRSHYQGYLRDNTACSCIPHKNIAVAAKSTYTFLNPCTTGIIQRNKGCAVLNSHVHKACDFFTVHFSKRAT

SEQ ID NO: 108049 - protein, 241 aa, Unknown
  Obtained from environmental sample
  misc_feature (1)..(241): Xaa is any amino acid
MNPDTLSSEPVVEQVEQQPVPMPMPTVQPVGLSAVLDVKNKDGKVIGHYQWAFHKDGKADSLVVVNVVKDHEGNEQVLYKTYAESVIAKKVSEEAKGETTVKENMATVRIGETYRAHDGTVSNYGISDLLTFQSFGFMLVLAVLAGLWALIGFVSYVIKILGLGQESPTAGASSAASAGARPTGKTIHPGMSDEKFVAIISAAAAHALGGKAVSVVKFKPLNTMDWTWAIQGRVSLHTHKV

SEQ ID NO: 108050 - protein, 119 aa, Unknown
  Obtained from environmental sample
  misc_feature (1)..(119): Xaa is any amino acid
MNSPNTIDITSPMNGVELGSDAANARVLGLSYGTISPDVISNAYVVSITDARGPAVWQATTKVNQYSGDLREKADDLVSLAITAKPANFNKVWDDGVKDWMNSGGREVLAERNALYPKK

SEQ ID NO: 108051 - protein, 146 aa, Unknown
  Obtained from environmental sample
  misc_feature (1)..(146): Xaa is any amino acid
MPFFVPFCYVCNYRLPFCICGFVNLVLHIISDARFVCGYNPSGHIVNFQKFRCLGFCRACHTGELFVHAEKILEGYGCKRLVFPANLHVFFCFNGLMNTLRITAAFHQATCIFVNYYNFSISNNIIHIFYKNIMSLYCLQNIMHPV

SEQ ID NO: 108052 - protein, 120 aa, Unknown
  Obtained from environmental sample
  misc_feature (1)..(120): Xaa is any amino acid
MLADEWTSACGGPERWRYTYGDSYEWNACATRDSMAQKSGSRPECRGYYGVFDMSGNLAEWTSTPAPQDKSFNNVMGGFWTSGNQSRCADARYSYYPQNKHNPVGFRCCVDAPPAAGGRR

SEQ ID NO: 108053 - protein, 371 aa, Unknown
  Obtained from environmental sample
  misc_feature (1)..(371): Xaa is any amino acid
MSDLSGEASGKRQRDEDRHRGQRGGSDGQPHLRRAVDCGHVAVLAALQMPVDVLYHNDGVVYKHTHGKRETSYRYHVERVAQSVHSYERGDDRYGYGERDNEGRPPVAQEEPQDDDGEYGTLHRRLRGVARHAFHHLALVEDCHILHVGRHGGPEFLKQRFHLVHRFQRVGAALLGYHEDHAVPAVHAHVVALLLLRVLHPRHVAYAYGRSVHGCNDGVRDSVDVPELAHGAHEVLLVPGADVAARHVHVGGHERPHHGVRPDLVLVEARFAQEHVYLAFRPAEHGHGGHALEALHTRHNGVLEVLLQFQRVVHAGHAVEQDRHLRHIELHHHRVVYARREVGLYAAYALPDVLAGDVEVRPPLEVDADRR

SEQ ID NO: 108054 - protein, 143 aa, Unknown
  Obtained from environmental sample
  misc_feature (1)..(143): Xaa is any amino acid
MDLPAASSTESLRTWTGASITFSRAVLWGKRLKRWNTMXTSSNVLLYSSWCILTRFVPLWQSKRSLSSINICPSSIVSRWFRARRYVDLPAPEGPIMQTTSFCSTVRDTSFNTSSGPLPREPWKVLCSPTVLIIDMVWLSLFV

SEQ ID NO: 108055 - protein, 192 aa, Unknown
  Obtained from environmental sample
  misc_feature (1)..(192): Xaa is any amino acid
MIRSAEETRRHDFVPVTDIVGVNTYIPVGTVSLGGKVVPSNATIKTIRWSLQSEGDTEGTTISGSYLTTKMEGYVEVKTTIVNGIAEGVNYTKIFTITIGPFVAVASITPGFPNTDEVGEIILYYDVNPTDASYIDVVWSIRDPGTTRPTLKGDVLTTKASGTVWVTATIKNGLALGTDYTQDFKIEIGVLP

SEQ ID NO: 108056 - protein, 203 aa, Unknown
  Obtained from environmental sample
  misc_feature (1)..(203): Xaa is any amino acid
MGQKAAEGRGAKPLPVNKAGRAATWKIFVKVRIALAFGKGDYLRGEVRFELGLADGTVNADIIAPLAFGKADKLQGDDACPLVQKLVERMLPVGSRFAEHRRPRVIRINRLAVAVRLLAVGFHVELLQMGGEAGKSLTVGQYRGAGVVKEVAFPYADKGVKKGGVFQNIRLKRQPVRFRRAGKEFPEYLRAKGKGKNASANRR

SEQ ID NO: 108057 - protein, 123 aa, Unknown
  Obtained from environmental sample
  misc_feature (1)..(123): Xaa is any amino acid
MSFCGFAETALKLFVEARQVDAEAVYDKDLNRISLPFPQVNVNTEIRVKFEKAELARNDTLKMVFDFLDKAWIEYETKRTVFNIVKADDAPAAALAALQSLNLPAPLYSGICEILCAAVNQTV

SEQ ID NO: 108058 - protein, 168 aa, Unknown
  Obtained from environmental sample
  SIGNAL (1)...(25)
  misc_feature (1)..(168): Xaa is any amino acid
MPFSISAFRSLLVAATRRTSVSTVSSPPTRSNWRSCKTRSSFICMFWSISPISSRKSVPPFASSKRPRRRETAPVNAPFSWPNNSLSRRFSESAAQCTLTRGLPLRGESSWMAAATSSLPTPDSPVIRTEALVGATRLIVSKTFRITVDLPIMLEERRPRSRSASSSR

SEQ ID NO: 108059 - protein, 141 aa, Unknown
  Obtained from environmental sample
  SIGNAL (1)...(20)
  misc_feature (1)..(141): Xaa is any amino acid
MRRVILAILGLLFTTGFCAAQRLIPEHRGLATQENTDEGLTARHPAIPKGGHAIVTNIATGKEIEVIITEQITPSSWRVIDLSPAAALALGFGIGGGGPVHIKHIGRARPAPEPPPPPPEPEPPPPLTQLGFPSQEIQRQP

SEQ ID NO: 108060 - protein, 195 aa, Unknown
  Obtained from environmental sample
  misc_feature (1)..(195): Xaa is any amino acid
MEYGGIDILGRGDNYEWLWTTYEQGGWFYDLNGIKREMINGFQKDPNNGVELTVKPEFVYENGIPYLQLRNIMYNPGNNTVTGQRFGASADVMIHENDYAPLLHKPYGAYMTDWETNPSLELMFVCEGGDGINPVDTLWLGRYGEGTHLNYIYTNNRSDALNLDSAIGFSYQNIALAPNQKKEFIVRFTLARTEK

SEQ ID NO: 108061 - protein, 132 aa, Unknown
  Obtained from environmental sample
  misc_feature (1)..(132): Xaa is any amino acid
MTSGRFGRREFCHQTQRTVQPLQLKVGPQVKTCAIIPRVAFYILQHNLCRGQRTAGFGFLGGIGRVSVHIIHNPAVQPGLHTFPVLERAYFIAHNALQVMGEARTGKHIREPGGEIRVGRGVGVHVFLWFLQ

SEQ ID NO: 108062 - protein, 113 aa, Unknown
  Obtained from environmental sample
  misc_feature (1)..(113): Xaa is any amino acid
MFINAASGQIRIFAIRVYTNRPGKVHQGLVVITFLDIFIAASYKFFSFPFVFFLSFSFSLFSSFSFSFFPCLSFGFFSCFPFSPFFSLSFSFFFSFSLFPFLFFNVSLFFLRR

SEQ ID NO: 108063 - protein, 195 aa, Unknown
  Obtained from environmental sample
  misc_feature (1)..(195): Xaa is any amino acid
MLLAHEFLKPFLYAGRLGFKVTAFQIFQHSGEPGLVFKMAGAFAVIVAYFYFIPAAPQDRVHDFFWQGLKRRVQAEFIMLREAFKAAAVPGAVGVIGNNAPLIKGKRGIGHDKVRIKLQPGTQAGTAWAGAEGVVKRKKARLQFRNGYAAVRAGVFLGKEIFGRPLGAYAPGGTFVASAFRGIFLALAQYQQKAV

SEQ ID NO: 108064 - protein, 127 aa, Unknown
  Obtained from environmental sample
  misc_feature (1)..(127): Xaa is any amino acid
MGGALSIDKVYRTPGKSWWEQEYWNKDEKDAIFSLLENENNFDYVLSHTGPSRINRLINNVDSDYIPKIKDEVSALNEIIDGRITCKQWFCGHWHKDIYYYDEKMKKGYQYLYQQTALLDGGDIFVL

SEQ ID NO: 108065 - protein, 103 aa, Unknown
  Obtained from environmental sample
  DOMAIN (6)...(29): 4Fe-4S binding domain
  misc_feature (1)..(103): Xaa is any amino acid
MISPEAVKNVDNCRFCWMCRHLCPVGLKTGKEINTPRAKALLLSLVERGTKFDADMARAMYECVLCGACTNDCVTGFDPSIYIREARSAAAAEELLPPGVQRR

SEQ ID NO: 108066 - protein, 198 aa, Unknown
  Obtained from environmental sample
  SIGNAL (1)...(28)
  misc_feature (1)..(198): Xaa is any amino acid
MLIVTRSIFWPLCITLASTVCLMRSAMAMAPGSAVSGRTTANSSPPYRAGKSVARTALFMQPAISRSTKSPTGWPYVSLKFLKWSMSVSSIERGRPCRFARSNSRAAISWKVRWLLRPVRPSVVASFSIFKYSIDLVRATEAFSTMVLSICSRSGLKNSGVALSAEKRPTHLRSSPPKTGMIKSERTFGFCGSSGTKR

SEQ ID NO: 108067 - protein, 128 aa, Unknown
  Obtained from environmental sample
  misc_feature (1)..(128): Xaa is any amino acid
MNIEINLMTYGREFTAIVKALLRDGKGVEKGGFLLVEXSVVEEMLKKRPYVTVADKLTAWRGLRWIDADEGHFTKRVRVENGRVYVMKISLLVYKTLKAVLSPPIQSRQPPIITGKKGNEKRKRPRLK

SEQ ID NO: 108068 - protein, 153 aa, Unknown
  Obtained from environmental sample
  misc_feature (1)..(153): Xaa is any amino acid
MPALNPSFHFAVHVVAQIVKAEFVVGSVGNVAGVIFLAPVVVHVGKNSPDSHAQIAKNRPHPFGVPACQIIIDRDNMYALAGYGVQIGRGDGHQCFALACFHFDDLALVQNNGTHHLHVVGALAEVPPCRLTGKGKSFRQQMIKGFAFLVTLA

SEQ ID NO: 108069 - protein, 135 aa, Unknown
  Obtained from environmental sample
  misc_feature (1)..(135): Xaa is any amino acid
MSCARRFGRGRRSARSRPAGQSAGRRGFRQGSGLGIRSPLYRRQPSPRPSSGCGTPGTRPLALSRVAGLRRTHGNISHGKSRTFYALGTQPGRRGRRGARQNRQADGSAVSGRRPSGHSGTTGQGGSHAVPPSVS

SEQ ID NO: 108070 - protein, 177 aa, Unknown
  Obtained from environmental sample
  misc_feature (1)..(177): Xaa is any amino acid
MAYNRFQKFVNSLTLPRGNQKSAFRIKPQILVNLPFHRRYVGCLHIDLVDHGHYFQVMFKRKIHIRKSLRLYPLRGIYQKESPFTGIDCAAYLVAEINMTRRINKVKFIFIAVRRRIRNCYRLAFYCNAAFTFNIHIIEDLVFKITVINKVSLLYQSVSQCRLAVINMRNNAEISCF

SEQ ID NO: 108071 - protein, 440 aa, Unknown
  Obtained from environmental sample
  misc_feature (1)..(440): Xaa is any amino acid
MERNLCLLLPLDKGWPARASTLVEPGKTGFAWDYAYDDYFPYQGGIGGSVDGEPFASMRDVRRHGQDVILTLTIDCAVSDEHLIQIAKDLIPFGRLMLRINHEATGNWFAFNKRYTYQQVADFYVRFHKIIKQYAPHINTILCIGGAQKNKSGKLHYEDEFAEAIAEADIWSSDTYLSLHWGWPFDIAEPGGTSHKRSLNKDILEGLCFDFERFMAHTDNRKPFVLSEINADGDVNGPYEQAEQIADFYNRIPKEAPDITGITFYQFRDRGRLGLEIEDPNNSDVGIAQPVLEDYKKIMTNDYYSPKMVQGEKIAFPAKLRWGSSEDSDGISIPIDFEDNPVFCEVMFTNPDDAEKLNAMMEINGKWFYKKPGVKSVDLSPAFFKNRLNGKQRLEFKLFAPPASGTNDPGQEEDWRINYYHTLNAAPEFRIRYEPAMKIG

SEQ ID NO: 108072 - protein, 212 aa, Unknown
  Obtained from environmental sample
  misc_feature (1)..(212): Xaa is any amino acid
MEQTDDAALRLARAHQQNVRLAALRLGVLQTVDKQLVGGNNGDPAPRDEDAAEVVHRHRRNPAPGALTGKRRDRPGMRQEERRLLPHLGKKLVEIVGSGRALAGLYDLALYGVLEQTVVVVIDDLALLTLLQALNGKLKLLFGLVVRRRVDVFHRRIHINNSGYGVQNILSRLLLIVHVPLRNFQTFLLGGAQSVERGVPLLNAIDPVDTGG

SEQ ID NO: 108073 - protein, 241 aa, Unknown
  Obtained from environmental sample
  misc_feature (1)..(241): Xaa is any amino acid
MFCPSCITRPAQVRSNMAILRLPMGTGNDGADSPNLVDALMLLIKPSRIEFNPALRLVTAPGGQAAKNHPACLAFNILSVGLDAFVTHMTNKMKGKLPGDSYKLWVDIASLLYDRLYKVDFLDVKADGGAITLHEKLLLLAVGASGHRTYGAQKKILPDDRNVCALKQMPLLRKLALKDLFSTGKHIDKPEAILFNARRVEFSGSVPILAQMDGEAILLQPEDFPAAIELTEPLIPVLKLG

SEQ ID NO: 108074 - protein, 200 aa, Unknown
  Obtained from environmental sample
  misc_feature (1)..(200): Xaa is any amino acid
MGTSVGPINRRGEGKGIGIQIGLINISESGNVIPIGLINKVKDGMKHFWIFTDDMLFLNVGYRSGSKIFYTHSNIGIGGGFLPRREGDKLIVSRSGFGFEFTLRKFFIDIDISTGNIFIVDNIKNLKQLFFGTNTGIYQVRLIGGFKMYERLGIFAGISYDYLYRKKNTDPDPEDFARTAPGKSIGNKTHKMGFFGGMQF

SEQ ID NO: 108075 - protein, 220 aa, Unknown
  Obtained from environmental sample
  misc_feature (1)..(220): Xaa is any amino acid
MVCSHLHVFKHGESVVRKHRRRAVHRQQVRGHAFVVHAPKADGEPARLIGRAGQTGLEQPHHPALRLAGAHQKNIRLAGLCLGVLHSVYKQLVGGDNGNPAPRDKDAAEKIHRDRRNTAPRALARKRRDRPRMRQKERGFLPHLCKKLVEIVRRGRVLEGLYNLALRDILEQTVIVVVDDLALLTLLQAFNGEVELLFGLVVGRGVDVFHNGIHINDGGD

SEQ ID NO: 108076 - protein, 232 aa, Unknown
  Obtained from environmental sample
  SIGNAL (1)...(22)
  misc_feature (1)..(232): Xaa is any amino acid
MSASSAIFLSGSTIVAAPNLNASPGIPHTTLDCSSCTIVYAPDSFMARRPLAPSLPMPVRIMPTALAPAYCATELNSTSTAGRWWKTSGPSLSSTKYCAPDLLSTMCLLPGARSALPGMTRSPFSASFTFIAQVLLSRSAKDLVKYSGMCCTITVPGAPAGKETSTSFMASVPPVEAPMAMILLVVFVMAKRFGGSVDMAARSFIMSARFLISTMAAAFIFCMSSSDISPTL

SEQ ID NO: 108077 - protein, 284 aa, Unknown
  Obtained from environmental sample
  misc_feature (1)..(284): Xaa is any amino acid
MADLQRKRQLGRRLFHIDNILHRRRSRNRVYAADAGGDALLAYYVEEAYLPGRGYVGAAAEFFGDGVYPHHSHLVAVFLAEERRRPLGFGRGGVFYDSLHAVVIHYPLVDNRLDFSYFVAVKPFEVGEVEAQAERIDARTGLLDVVAQHFSQRGLQEVRRRVVSAGRHTQFRVYRRGHRRPQILVGQHAVDLHAMDYRVIPLDSVFHRDIDAARCGYRPLVARLTAGLGVEGRLVEYEQVRVTVDIFNLLVTAYVYLRAVVVIPQEFSAGKRPKFSPPLRRKPV

SEQ ID NO: 108078 - protein, 112 aa, Unknown
  Obtained from environmental sample
  DOMAIN (9)...(63): Helix-turn-helix
  misc_feature (1)..(112): Xaa is any amino acid
MAETISGRIRHIRKTLNMSQVEFAKAIYISNGYIAELECEHRRVNDRIIHLISLTFGVNEKWLKTGDGDMFYKTPGEKLQRMVGLFNELPPKFQDYVMQQIEQLLTVTASGE

SEQ ID NO: 108079 - protein, 235 aa, Unknown
  Obtained from environmental sample
  misc_feature (1)..(235): Xaa is any amino acid
MVGATTYREPPFMSEAYAYIEDDSFPLEQTTALGSSLXLSTSFSSPLSPLSTLSNILFPDFENVKTSIPYDSEAAPAPAFIVNDPSKASWAIARILEAEAGIAQRSALAESYKARIDQWLDSANKQDIDSISYLSFLLEPYVKDEVAKLYKSRTLSLPTGTASLRKLPDRLEITDSTAALAYCEAEHPEAVIIKKELNKSILKDLILKQAEPIPGVEAELGPDKLYVKPLKLKAA

SEQ ID NO: 108080 - protein, 468 aa, Unknown
  Obtained from environmental sample
  SIGNAL (1)...(22)
  misc_feature (1)..(468): Xaa is any amino acid
MKLKPSITAFLVFIAVQTAVYSQGSVFPRLKPDPKALEFYRLGENGGYSWTQLAEISLWASGNASSANLDKIRAAAETIKNAADLPDSYEGKAEYILTFMHKNLIKSYSLYQTRIDTMLSTGRYNCVSSAVLYMILCESMGIHANGVMTKDHAFITIPIGDIVIDVETTNAYGFDPGNRKEFHDQFGKLTGFSYVPAKNYRDRETISQIELISLILNNRIADHERLNQFADSVPIAIDRASLLEGNALKVEPATETHRAIFTDPRIDLLDRLFNYGAMLLRAGKEEDGLRWAAAASPVYPDEKRWQEFIMAAVNNNQTKLLKANKFADARKFLEGQKNVLSQANYDKLETILIESELLGKANQIRTAADGDSVINAIDLARNGGKMPEKRAVELITFAVQKTASSVSAPPGGNWRAAIQYIETSISRFGANRELEQALNVYRGNLATEYHNRFATEWNKKNMTRLSAV

SEQ ID NO: 108081 - protein, 223 aa, Unknown
  Obtained from environmental sample
  misc_feature (1)..(223): Xaa is any amino acid
MILPSQYYEENLYPLQDGVMSILQHSGTDFFLTGGTALSRAYYNHRYSDDLDFFVNQSQTYNDQLNKVLALLQENGYTWXVNKEYTRAKDFTTXKVGKDSETLLKLDFVNDLVPHYGDIVETSLFYRTDSIRNMLSNKLSAIFRYAAKDIIDIREIALHETIDWPTVINEARNKEAGLELVYISEILTSMPQSEFETVTWTKKPSWQEFRSDIDRIILEMISG

SEQ ID NO: 108082 - protein, 155 aa, Unknown
  Obtained from environmental sample
  misc_feature (1)..(155): Xaa is any amino acid
MGASSRNISLRGEVQVTGDGYETLLKDQRKNAPEYFNMGAKGLKISDASFEALYGQKLLSSKREAGQFDANSTLGDIKHTAIGKKLEAYIFQQIAEVFSGADDLRVMAERQFVEMPLRSLPMFSGGKVTPSMMEALVDVLNGKPCSDPGLAGFLG

SEQ ID NO: 108083 - protein, 101 aa, Unknown
  Obtained from environmental sample
  SIGNAL (1)...(56)
  misc_feature (1)..(101): Xaa is any amino acid
MLIVSITSIQIMPIPLSILIIPLVLIMSIPLSILIMPLVLIMSIPMLISMMSLVLMLIPLILIILLIRLIQISILMLILILIMVRMSIQTAHPSNRLSNGH

SEQ ID NO: 108084 - protein, 185 aa, Unknown
  Obtained from environmental sample
  misc_feature (1)..(185): Xaa is any amino acid
MDIPHPVGPAAGHVFRQGQNRGQIKRPFKLSRGQYYGQHGGRADHVRMHGRQIGRGLQGEPPGIVGQALAHQHHQGRGPVALVGQGDQPRRPAAAPAHGQEQVELFPGQALFIQHLGFHIPGPGQAHRPAGEAFGIEEVAGFVAQGAGQDDGLGRGLGQADPLRLVFDVPAPKPKAGQGGWLGRI

SEQ ID NO: 108085 - protein, 106 aa, Unknown
  Obtained from environmental sample
  misc_feature (1)..(106): Xaa is any amino acid
MRPRERRCRDETQKVSIHAPVMGATFIAWLHMAERKPPVSIHAPVMGATVVPYCLAPSLVRFNPRTRDGCDEWIPVGFDDRWLVSIHAPVMGATVATSMESGRPQP

SEQ ID NO: 108086 - protein, 131 aa, Unknown
  Obtained from environmental sample
  DOMAIN (18)...(72): Helix-turn-helix
  misc_feature (1)..(131): Xaa is any amino acid
MEGSLPQKEWDGNINKRIGEVRKALGMRQDEFADVIKVSRSYIGAIETSHREINDRIIELICINCGVSDKWLRKGTGKMFLEKRNPRQDRLMRIFNKFDDYLQDCVIKQLELLLDAQEKIKDKNKFLVIYH

SEQ ID NO: 108087 - protein, 198 aa, Unknown
  Obtained from environmental sample
  misc_feature (1)..(198): Xaa is any amino acid
MIQRGGWEAQKALERINLSIKRFSIWTRAFDLLKIHGAGWMGNPGLSFGKNPPFAPGGTVFKKVVSYEYGFTKNDLYAAYLLSALTEKIKFGRSAAKPSRGQTKFLFCFVIIELLKYCMDSIPIEKTNANVSKAVRDIFSDLGCDAAKSLSDSALTVIDDYMTKATDXSLYKEDTFTGDSNAFLKMKFRKGSFFPNTW

SEQ ID NO: 108088 - protein, 109 aa, Unknown
  Obtained from environmental sample
  misc_feature (1)..(109): Xaa is any amino acid
MIFGNKAVGRMAARTAELMGEKMPIHIITMDKGLQVAQSAIADGARVIISRGGMGEYLRTGLDIPVVTVKHSVFYYVNAVNQARAYSDRVAILSFSLAIKMTRKVQNLL

SEQ ID NO: 108089 - protein, 105 aa, Unknown
  Obtained from environmental sample
  misc_feature (1)..(105): Xaa is any amino acid
MAPAGKISRAERGNALPPALRGPHHERGQPPGFPPPGPGRLRPPGIPGGPRFPGGGDAHDAGHPRRRLGQALRDLPPRLEPETLSPDRPGTPSQAPPGGRFRPCL

SEQ ID NO: 108090 - protein, 100 aa, Unknown
  Obtained from environmental sample
  misc_feature (1)..(100): Xaa is any amino acid
MNAGFVAEVLVHVIAADRKNNFLNAAKLGFVGIHYLEFPALCFREAGIQAVHIRGEQGRFLSARTGSYFHDDVFFIQRVFWDKEEFQFFLRVPQFCFQFL

SEQ ID NO: 108091 - protein, 297 aa, Unknown
  Obtained from environmental sample
  misc_feature (1)..(297): Xaa is any amino acid
MIQYLNECEELKKKKLIRCTRDRDDDCISFRVPRDVKTSLGKNIAFKPERNDNISIYKFFTVLEQLFDDRGNSELTSDSLETELLELINMNMHLLFCKKIMSYGLNEDDIVLLCLFCHLYSENGDDHIRFHDFYYLYDDKTEAKYVKRDLSDGSHILIENKYIEFVNNNGFVNNEAWKLSDMAKKELLCELNIEKKSFHKNIIFHNTIQSKKLFYNEKESESIQKLISLLKEENYRKVQGRLSENGMRKGFACLFSGTPGTGKTETAYQIARETGRNIMMIDISNTKSCWFGKAKKR

SEQ ID NO: 108092 - protein, 105 aa, Unknown
  Obtained from environmental sample
  misc_feature (1)..(105): Xaa is any amino acid
MAGDGALYRGADHDGRAAFAGAGVLGRREVSPHIRRRRERRGHPRGRRLPRGRGQARHDHRREAGGALRHHSGWRRRRRQRVSRKTRQRRRMGKRRILCHGTGRL

SEQ ID NO: 108093 - protein, 134 aa, Unknown
  Obtained from environmental sample
  misc_feature (1)..(134): Xaa is any amino acid
MENFIDEEKILDIIEIKRKSFMQILQNFICEKYNLSFTEDIERQMIKIYKGAKISRQRFSKIGKKEVPTKRTVIRLGFSLKLPKDKMLILLKSSGYFLGINSKTDIILRWCLENEFYDIGKINVFLKKINAKEI

SEQ ID NO: 108094 - protein, 178 aa, Unknown
  Obtained from environmental sample
  misc_feature (1)..(178): Xaa is any amino acid
MPALHPSLHFAVHIVAQVIKTEFVVGAVGNVASVVFPAPVIVHIGKNRPDSHAQIAENRPHPLGVPACQVIIDSYNMYALAGYGVQIGRGDGHQCFALACFHFDDLALVQNNGTHYLHVVGALAEVPPCRLTRQGKSLRQKNIQAFAFLAALAQFCSLFRKFIGGQSRGPGLFFIDRM

SEQ ID NO: 108095 - protein, 297 aa, Unknown
  Obtained from environmental sample
  misc_feature (1)..(297): Xaa is any amino acid
MERHGICASVTWPRTKNSITGRRGDGAELTGEYITSLTQEKAVSRKFTQIGFTTWPQLGTTSKKKQLVALLGKDKLAQSLVMDDSRYIVSEKHAASILFDETATEEWLGALEDQDHIVEFYVVTQNAGLFNGVRERVQELLGDQIVQEPVKLPMSAGFKANAEYFRLGFLDKENVALRKQFREIVPLLWLKSGAKGRRPVVKGGGVPIMFMPEDSNFAVLTDETQFEEFLPGLEKCPYAEYVYLVTDSESNFLRMVSAVCHDDDPSWKNVHEVGRDHIFQLYRDYLDNFVINSNGQV

SEQ ID NO: 108096 - protein, 242 aa, Unknown
  Obtained from environmental sample
  misc_feature (1)..(242): Xaa is any amino acid
MRSGIFGGRGRPKYLGAPRCFAVVCGCLALALFAGCAKPPSRQYYMLNYVPPAMERRAMQNPYACVIRLREFSIEEAYNRSNIVYRMNPYELRYYNYKSWAVKPTRMLTDLFFRHLSAAQLVSGLVRRFDEGRKPDFELTGFIDALEEYDSEDMLFAHVSIRLNLTKLSDGAMLYSRSFSRRKKVYTRETGLVVKEMSQIMEYIFTEAISDIDGKLAAEFGISDQGPAFMPVEEPSFTAEDD

SEQ ID NO: 108097 - protein, 116 aa, Unknown
  Obtained from environmental sample
  misc_feature (1)..(116): Xaa is any amino acid
MIKFVNPNCSDNSDCAGAGTELKATSGWNKDGNKSGNGTNDFGFSALPGGYGYSYGVFLDVFLGGFLYVGDNGYWWSATEHDASRAYCQDMIYNYEGVARSSGDKSSLISVRCLQD

SEQ ID NO: 108098 - protein, 117 aa, Unknown
  Obtained from environmental sample
  misc_feature (1)..(117): Xaa is any amino acid
MFFPPPLFFFFFFTKKKKKKEGGAPPPPPGGGGRTPPPRARGKKKNPFFFVGGKKKFFFPPPLKKSPPLFLRKKKKKPPFGGQKKKKPPXPKKKXFXXXXVXXXFXFIXWASFIFSF

SEQ ID NO: 108099 - protein, 201 aa, Unknown
  Obtained from environmental sample
  misc_feature (1)..(201): Xaa is any amino acid
MMRITRQIGSRARSRRLVIGGRPPDGELSAPDATGGRASRRMPISVNAETTNVPASIANPAAAPARATSTPPSAGPASWLSWVVPSDRALPACSCSAPSSAGTIVDDAGMKIPSPAPSASAMTNRTGARVIPAAATIANAATAIPRAMSATSITVHGLKRSLACPPTSSRAARGIPYAVRTDPSSSVPPWWARTYHGSATE

SEQ ID NO: 108100 - protein, 137 aa, Unknown
  Obtained from environmental sample
  misc_feature (1)..(137): Xaa is any amino acid
MRSVPERRLTKSATSGGGMEESSRRSSIHRLPSTSVVSSGNGSGSSSSSTTSGSTVSIASIVLTPPSLTGPGAGEKSSGAGSDGAEADGTAVTAAARAAASIARVSSAAGSSAVLSALSASMVSDIGLNIFLRGRRS

SEQ ID NO: 108101 - protein, 196 aa, Unknown
  Obtained from environmental sample
  misc_feature (1)..(196): Xaa is any amino acid
MGKYITPIAMLDKCLVKNGVDDKIRQKIVGYGENIKITNKPEIIAEACFNIMTIMDELLDEETKKKVREGCACCLGGEQNKKCKEVNKKYESTEERIKAINETNSDFGYGYKITEKGKYEITFYNESSPYYRKCVCLGMRLNSINKKWSKTWCYCCGGHVKHHLQTILGKKVNVKILSSALTSMGKKGCHFELKEI

SEQ ID NO: 108102 - protein, 106 aa, Unknown
  Obtained from environmental sample
  misc_feature (1)..(106): Xaa is any amino acid
MAYLAASCSQPADLTHRIWGEVVMEHKMLPLVAFDVVKHLLVKHRAQGRYNQSLCFTAGKERRSVCSGQYFNFAGDITYVFGAASVNAAAVVKYRRTEDVILHILK

SEQ ID NO: 108103 - protein, 151 aa, Unknown
  Obtained from environmental sample
  misc_feature (1)..(151): Xaa is any amino acid
MRGDAPRLRQQHSAGGASHPLRQMGHRRRPRPRLRRANRHQILRRYRHPDKIQQQRLRHPADFLRPGQKSPKNKQRRRPQRHPNKGNLTGGPTHRRRGNLRSQHRIRPRQNPQRRGLAKVRRRRHLPGRCKGSTRSKRCLALYLGGKDLHP

SEQ ID NO: 108104 - protein, 279 aa, Unknown
  Obtained from environmental sample
  misc_feature (1)..(279): Xaa is any amino acid
MCIAISKVNPGRTFGTYMPLKYANYGQYYVGGMLTPSFGKFMFDFTTGRYCFSDFAEYFEMYQRIRAAGAMFPGIESLDDDTARAQFAEGYIGFILVMPSFNVGVLYDQFPTKMEWKIAPIPVKDANTRYNLMGTTATNLVVSRKAQTDDLLEEAARVYAYLISDEVLGTLYTNGKELPMNPRIVQNAKPSSRQQWNDIAVLAAEGTVQRPNFPDALFVMEGDDVNTAFGKILTGGNARQILADMDRRFNAAMDTAISRGTIKREDFIKPEIEQQFKKK

SEQ ID NO: 108105 - protein, 226 aa, Unknown
  Obtained from environmental sample
  misc_feature (1)..(226): Xaa is any amino acid
MKSKWITAPGEERYYGEHEYGQHDVLGLDHHGGAAQRQHGGGGEDRVGYQVEVYVELRKGEYGRLGETDEVEGYRERLRQEDRERYRPAELRPERPRYKVVHPAALDLGVGGYGGYGEARERGHRLSGYQDAERLIYTGVAGYEGGAHEYDEAEDGQNGGQEDALEGGELLHIGGGGLSPAPVLFGRRRRRGRRLVDRRVGGLHGSSAKVNIFNIRILKYIMPHRI

SEQ ID NO: 108106 - protein, 147 aa, Unknown
  Obtained from environmental sample
  misc_feature (1)..(147): Xaa is any amino acid
MVDGAVLQNILNYGPVFLLIAARAIAMIETAPLLSSEAIPQVAKMALAGFTAFAVMPTAAVFAVEATAAGAMGVGGTGAVMIPGESGIAFLSDLRYEPFSFRFLLLLVGEGIIGIIIGFFPYGNFCRLFYCRPVLLPANGIWRFGNF

SEQ ID NO: 108107 - protein, 144 aa, Unknown
  Obtained from environmental sample
  DOMAIN (25)...(79): Helix-turn-helix
  misc_feature (1)..(144): Xaa is any amino acid
MLAFSCLFFYIDKGKSMIATIQDRFIAVREALGITQRDFCKGIYVSQSYYAQIESGKRPVNDRIIALICSQYGVKKEYLLTGKGKMFCEDLPDIQLKQLLDVFHELEPPFKDYIVSQIKQLVEAVNKQRAQSTLNKGKKRPSDS

SEQ ID NO: 108108 - protein, 102 aa, Unknown
  Obtained from environmental sample
  SIGNAL (1)...(52)
  misc_feature (1)..(102): Xaa is any amino acid
MVYFVPFFKAAQNRNCIFHGRFRRIHLLKSPFKRSVLLDMFSVLVQSSRAYTAQFPASKRWLKQVGGVCRSFRCSGSHESMKLVNKKNYFPVFRLHVMDNCF

SEQ ID NO: 108109 - protein, 220 aa, Unknown
  Obtained from environmental sample
  misc_feature (1)..(220): Xaa is any amino acid
MILPLRYYEENLYPLQDGVMSTISKCGVRFFLTGGTALSRAYYNHRYSDDLDFFVNDDDDYPAQVKEIFFKLKEDKFIWSSTVDFISNKNFTSFKVGWEKSDTLLKLDFVNDVASRFGDIVKTELFVRTDSVRNMLSNKLTALFRFAAKDVADIREIALHEKIDWHQAINDARKKEAGLEIPIICDILQGMPQVNLKPLHGQRNQAGRNSAATLNGLCLK

SEQ ID NO: 108110 - protein, 152 aa, Unknown
  Obtained from environmental sample
  misc_feature (1)..(152): Xaa is any amino acid
MRVNASWPGVSRKVILPCGVSTMYAPMCWVIPPNSPDTTSAFRIASSSLVLPWSTCPITVTTGGLGSMSAPSSVPVSMMVSSYRLMIFTSAPNSAASIVAVSASICWLMVTIMPSFISFWIKSDALRFIFLASSDTEIFSMISIDLGTGLAT

SEQ ID NO: 108111 - protein, 125 aa, Unknown
  Obtained from environmental sample
  misc_feature (1)..(125): Xaa is any amino acid
MEFFGFFRQAQGLAVAFGVCHAGVAVYPVLQGTALLIGDNRNRKAVEEREAAHNGGVVAERPVAVEFRKISEDTVDVIQGIGPFLVAGKFHLLPRGLGFGSLVEADFQHVEFIGNINSRFTGELF

SEQ ID NO: 108112 - protein, 134 aa, Unknown
  Obtained from environmental sample
  misc_feature (1)..(134): Xaa is any amino acid
MKRLQFLGIIFIITTVASFISCPMEEEVDTFVPVKSITVTSRKGTVGDEFTLIGTVTPSTATNKTTKWTITDAGTTGATLTGNKVKAMKPGTLTVKATIADGTAEGKAFTQEFSITFTNPFPVTDITGVPTIGT

SEQ ID NO: 108113 - protein, 165 aa, Unknown
  Obtained from environmental sample
  misc_feature (1)..(165): Xaa is any amino acid
MLPPRLLYAGRGKIAEDAKRKEPRDSPARGRRVPPDPPQHRALLPLRNVGGGEREHGAGRGGGGRGPRGDDPRRHRGQNRIPFGARVVPRIRARPHLDTRRAVRRVRQPHTELYRGRDRGDNPAADEGRRENGLGLEHHTLRGRGFRRGRPRAPGGERRREARRL

SEQ ID NO: 108114 - protein, 237 aa, Unknown
  Obtained from environmental sample
  misc_feature (1)..(237): Xaa is any amino acid
MIHGWRSCSDCWSKACSGRGFVGREGMRCEKCGFSYDPDAPEDVKAHRVYHADWAKVNEPKPHRAIRNHGVQPVPYATLPGNLLLVAYASPRRLKEAVYDRARWFRREMDYFTVPWNKNWPDTDLRRGILFVSEDARFIGACAFEWQEYTTIPHAWEMRWAWLAPAWRRKGILTRSWPALSRIFGDFCLGTPFTRAGAAFVLKLRDNADVPRGIGLKFAERQARHDIEKEHPPGLWD

SEQ ID NO: 108115 - protein, 170 aa, Unknown
  Obtained from environmental sample
  misc_feature (1)..(170): Xaa is any amino acid
MEVLRHLRLSHVHKVVDGHYPYQHTRRINHGQRQIVVLLDYSNRLFLVCVTGERHEVAVHYRLYALLRRRQYQMPQGYFVQQLSVRVHHVHDVHRLALRTVLPYVFKRLRRGHTRPNVHKTGRHNPAYAALRVPQQLARLRQISRRQQTQKPPRYLRRHLVYQSRAVVWA

SEQ ID NO: 108116 - protein, 303 aa, Unknown
  Obtained from environmental sample
  misc_feature (1)..(303): Xaa is any amino acid
MLGRAADHITGRKSYRQRRDYCXSGFSLDXAMGSHRTSRGIEFKRGXCDITVNTSGYYELESLDNLASAHKVDLNNIPRRDYKNKAVLCVKLLDISEDVRFTIALLLNEIFITLYPESYHYITAVIKMKSDTESNISALLSPVQLQGFDDEESIYIIEDSEIDLGLLVSVERNFIRMLEIIADFLAWHGMVLAENKDKGQTEPKDEVKGTVDKVEEKSEEVKTTEEKKEEANTVEDKAEEKIIEEKEKEEKISAEPVKETVSDTKNEPDVTAVEPIVEDNNTDLSPPETEELYDERDYCSRPI

SEQ ID NO: 108117 - protein, 319 aa, Unknown
  Obtained from environmental sample
  misc_feature (1)..(319): Xaa is any amino acid
MQEIQICNYMLGDSIGDLFSNRCNNIVRQGNADRGERGNRKHHRVCDFLVDKYFYKDENGFVKIRCDCFYRHPYQASKMAESPYHVARIFHLAGSFPQKILKILILTLTLTSEASMITRIIALLTLSIMSAMWVFVDCSKNGSGQLSAQELAMLSEIESAAAQSTPESASPSQDTAPQLAQASPPSVQSEAKKKSAKTGRDTVEIREKMFIAQTNDIYINKDDYLGKTVKYEGLFEQSTWRDNGKTYRYVIRMGPGCCPGDNSAAGFEVVWDKGYPKKNDWVEAVGVLEEYDDDGIPSLRLALTSLTVLAKRGKEKVTQ

SEQ ID NO: 108118 - protein, 124 aa, Unknown
  Obtained from environmental sample
  misc_feature (1)..(124): Xaa is any amino acid
MKERSGNFTESIHNDDYESEYLQTHLNASQFVNITGRKVESWYDPDFEKLPKILSNSNPDKPVLICEFGGDARLGQRGTTDELWTEDKQKRIFEQQMETLNWLFMLCRNFIKITCWLNYVRVSR

SEQ ID NO: 108119 - protein, 178 aa, Unknown
  Obtained from environmental sample
  misc_feature (1)..(178): Xaa is any amino acid
MARGVTACSSTGRQEHAPRVLRRRGLRVPEAQPAPGARHGVRLPDQRAVRHGQVRSVAQHAADLLHVPVAGAGGAAGEPAGDAGAEARRASQGRRIRLQIGGGLRVRPEERQGDLRVLQGAQRRPQGRQREGHRQDDQRLLRVQPEPLPPRRAGRPVLRQDPQDRHRGRLGAEQEEPS

SEQ ID NO: 108120 - protein, 156 aa, Unknown
  Obtained from environmental sample
  SIGNAL (1)...(54)
  misc_feature (1)..(156): Xaa is any amino acid
MMSGTNKTFAVRGAPLVSRKFRDMSTMVLPRQLMRRRLSLFTLAMITASRFSVAAALIKASASSDEQSTAILSWDSEIASSVPSRPAYFFGTASRFMSRPPASSPTATETPPAPKSLQRLIRRLTSLLRKRRWSFRSSTAFPFCTSAPALSTDSPV

SEQ ID NO: 108121 - protein, 194 aa, Unknown
  Obtained from environmental sample
  misc_feature (1)..(194): Xaa is any amino acid
MHAVSGLFHSHLWVLFAFPSRYYTLSVIGSYLALEGGPPVFAPGSSCPALLLNRPPANPSPKGLSPARAPLSSGLQGLIHRIMPAYPASPRFGLLPLRSPLLGESRLISSPPGNGMFRFPGLAPASLRVPGFWPGGLPHSDSQGSLDGAPRPGVSPLPASFIAGRCLGIPRVHISFNALFSTHFYFLCFLFLLL

SEQ ID NO: 108122 - protein, 291 aa, Unknown
  Obtained from environmental sample
  misc_feature (1)..(291): Xaa is any amino acid
MHGIHIAQHPGHTLRVAHHQVTARTQQSGKFVHQLLPYYVVKVYHHVSAEDEIERTLHRKRRLRQIQPLERKHVRERVVHRVHLVGARSAHGKILAPQLRVDPLHFRLGVLPRPSHLQYFRRYVGGQYLAIAAETMRVLEEGHGERVRFLPARTGRAPNTHLVAPLFHHLSDIIRHKDKVIVLTEERSNVRGNHVEKLNELRLRLLAGAGQVLQVILVVVVPKGTQPLTYAGGDKRLFTLAERYTALVVDQLTKRVKCPPIHLHSRFPLPIRFDLSFYCRYLLPNMYIIIT

SEQ ID NO: 108123 - protein, 324 aa, Unknown
  Obtained from environmental sample
  misc_feature (1)..(324): Xaa is any amino acid
MQIVPIGRGNRRLLLNENALTCFXAAGWTAGVRYNXSLRGTIRAVDGRELRIERFVSFYAVNKNEAPFLEWYSPSDGESTGTGGFCFEFHFSRSMNRLSVESALTMEGIGNKNFEWSDNNKELKVSLGDKLSALTLYKWNLKDSAKSTDGAPLVKTYSSFFITDLDKIIPQVNDVYPVMYTNGQWFPEGSKIETGLRAGEGIAVVFNKPMSENALRSLRFEPALSGRMEFLSEKSVVYIFTRNPEPEKIYTLIVSGDTTDTSGLKIGDDYKINFTPDIPYLNIHSFSAEDISLDMDNYSSSVLAVPVKSATGYFLTHCSFLPVS

SEQ ID NO: 108124 - protein, 247 aa, Unknown
  Obtained from environmental sample
  misc_feature (1)..(247): Xaa is any amino acid
MILRFLILKHISRGAFFEDRSNAASGRFSPAETWVARALRDGFPFKAPCVSGGQVLPTRRLSLYAAWFENRFRQYPETRNYGVFQDGLAIAGIQPADAETLLSLPECRAETDKKLRAAFSQIDGDFNNPAEKQKRAERYAKAVTALINGLEDIKSAAEKGAGIARKALNGKADSGGQNKILKELDEIMRRITESEVKEVAGFLFPAENEIGKNENAEKDSFYAFLESSNKLFSSLAQTVEFNLKNFN

SEQ ID NO: 108125 - protein, 113 aa, Unknown
  Obtained from environmental sample
  misc_feature (1)..(113): Xaa is any amino acid
MRLFKLDEKIRIKIEHEISRIDKSLNSVMPLLDICKLKEPDIIEMTAAAQVLHSFYNGVESIIVLFFKYMNEKLPNDLKWHKTLFEMAFGMNSKNTKIIRDDINWKNTYCLDI

SEQ ID NO: 108126 - protein, 109 aa, Unknown
  Obtained from environmental sample
  misc_feature (1)..(109): Xaa is any amino acid
MPSARPPRTPDASRDWKSNGSLTNPPRPPWPTALTARATKKSRSSTSAAAPLTFPSWKWATTLSRFVPPTAIPSWAAKTSINASSTSWWKNSKRKTASISPRIAWPCSA

SEQ ID NO: 108127 - protein, 327 aa, Unknown
  Obtained from environmental sample
  SIGNAL (1)...(20)
  misc_feature (1)..(327): Xaa is any amino acid
MRLNPGYYTPALITHLMAQAAESPLVQEQLDNPYVNVFTGNTFAEEQAGDGVDFDFAQVISVDEDLLADALHIDTSALNINPNNLNFNVPDLGNLAGNAFNIDPNSFTLPPFELGDMSALTDTLAGAVQIDPAAFGAIMAGVLHDFVENELLAGGGQQCFEDENGEVICVPVPPVLDPNTIADRFIEYLNRPEVQASIGAQIAAVFNPEQMQAEIAAALQGYIQAALQTYMVTAMTALQNQIQQQMQIAGANLANEIGRQMQTAMTDLSTQINREMQNTLSQVNDQIPALDAETLTEAFQLQLTEDELFALMESMMADTAPTXGTQL

SEQ ID NO: 108128 - protein, 187 aa, Unknown
  Obtained from environmental sample
  misc_feature (1)..(187): Xaa is any amino acid
MFSKRGFHGFLKKFKNSCKKRISTISYIVSLKLFRDLFRHRKGFVFRIANESKFCMLLCYNRRTGDVLAQLCDKYGSDKGSMHDFSNVYPWGPHLYTEYYTMLFNQNRETIKNVFECGLGSNNPNILSSMRINGKPGASLRVWRDYFPNAQIFGADIDQEILFQENRIKTFWLDQTSPEAIKSYGAN

SEQ ID NO: 108129 - protein, 135 aa, Unknown
  Obtained from environmental sample
  misc_feature (1)..(135): Xaa is any amino acid
MSALETNPAAGRCIIGRSELTPMLTVALVDVPSMHGMIVASTDDRTLSATFTAPSKSEPGSSIMNSSPPQRATKSAGRFSDSLNTPATVRKRVSPCGWPKVSLYTLNLSTSIIRRLIDSVSLMARPHSLANWSLK

SEQ ID NO: 108130 - protein, 108 aa, Unknown
  Obtained from environmental sample
  misc_feature (1)..(108): Xaa is any amino acid
MDGVPAWAGFECMAQAVSVLSGLRSREKGERPKLGFILSVPSMRIEIPLLKPGSPVEVNVQEVDCTEMIYTFEGTALAEGMKVMEGKLMVMEVSDERFKMLTGGEWPK

SEQ ID NO: 108131 - protein, 239 aa, Unknown
  Obtained from environmental sample
  misc_feature (1)..(239): Xaa is any amino acid
MNHIFSRFKKVLSPGEARVNQAIHCHRAKAPRGFVHHPAKGHLVAGVYHERKKGDGVLDLLAFIEFKRADYLVGNFTAQEFRFKTKRLRVSPIQYRPIRPARRRCLRRLRRLRRSYADADADADADAAALHGFFNQRGAKIHFFILIGQKGKHRLFAAAPFGAERFSQTAVIVIHHRRRDFENGRGGTVIAFQPDNLRTGKTVGKLQNILYLGSPKAVNRLIIIAYHTNIGIRAAQFLQ

SEQ ID NO: 108132 - protein, 166 aa, Unknown
  Obtained from environmental sample
  misc_feature (1)..(166): Xaa is any amino acid
MKPHIHNRSDMAGSTRAFPLLGPYGERMVGEFNGKQFPSGYRPVTGWTGHINEDATGLVYMRGRYYSPLWHRFVNSDQGADPAVPNQYAYVGGMVLGATDPSGLTMLPTSRVEHMEQLLDDREIDRWLASVEAFFAASAREKAMDALVEWLKAGGGGDLRCQQTAG

SEQ ID NO: 108133 - protein, 293 aa, Unknown
  Obtained from environmental sample
  misc_feature (1)..(293): Xaa is any amino acid
MEENWGGEFGPSFLLRRTNFKVDSGRMEMTSGEMRSDPYRAPSRLGPPQIKGEFGFEVVPGAHDEIFAAALHSEWAGNRLNAGRDFVPRSLRIEHITFGKRITYRGCAMEKVSMSFSPNELVKASGNFLGKDRVEADAGGDALGDVEMPPDTMAAANWDGIFKVGNTGETLNACNFMTELSLDITRVINLRHVLGSKFPVGAHAGRFDVSGSMTILPTDASWWSKFYSEEIRLGLEITLHAYPAGSGSYTFSLPRLLLTGSPEICQTQKIADTDALLGGGDPCNKVSLFYNPT

SEQ ID NO: 108134 - protein, 365 aa, Unknown
  Obtained from environmental sample
  SIGNAL (1)...(25)
  misc_feature (1)..(365): Xaa is any amino acid
MNLKPSITLTLILALIISFHAEIHAQNSFPRIEPEQKALDYHRLGAQGYSWTDLAEIGLWASGDASLSGMAKIKTVTSALNTAITPDLSDKEKADFILNYMHKNILKSYYLYQTRLDTLLVNGRYNCVSSAVLYIILCKSAGINTSGVMTKDHAFAMVHINGQNFDVETTNPYGFDPGNRKEFHDSSGKTTGFAYVPPQNYRDRQTISQIELVSLILNNRIGDFERAGNFSAAVPLAVDRAALLLGNSYTRTSENLVSDFLFADPRKELMDRLINYGASLLRSSKEEDGIRWAVLASSLYPDPGKWQEFSSAAINNKLTKFIREKKIQDARNFLENQKSLLSQTDYNQFDVLIFDADLLNKDKYF

SEQ ID NO: 108135 - protein, 123 aa, Unknown
  Obtained from environmental sample
  misc_feature (1)..(123): Xaa is any amino acid
MMQTLVTSGYAPRLVQWVENMTDYDLYDVLIDIAFGATPHKRVERAYNFGSKQRSWLETMPQETKAVILAIVAQFGQEGSDVFENPQLFKVDTIRKAGGLDALRWNGGAAELMAETKRRLFAA

SEQ ID NO: 108136 - protein, 217 aa, Unknown
  Obtained from environmental sample
  misc_feature (1)..(217): Xaa is any amino acid
MRIQKATLFFMTSGTGKRLESADAVRRAAGLISIDTAYNRSAANLGINGGFKAASLEKFKNYIPSLYTQILFLPDSLASYSALSALETNPAAGRCIIGRSELTPMLTVALVDVPSIHGMIVASTDARTLSATFIAPSKSEPGSSIMNSSPPQRATKSAGRFSDSLNTPATVCSSVSPCGWPKVSLYTLNLSTSIIKRLIDSVSRMARPHSRASWSLK

SEQ ID NO: 108137 - protein, 551 aa, Unknown
  Obtained from environmental sample
  misc_feature (1)..(551): Xaa is any amino acid
MTQAYAGELENMWRERLLEMEAAESASVKRNIAKPSPTKPSSKKSNAAKSSSSRLAAAKAEFAKYEATRGKSRVQSEPETAEPELGPSGFAKIEPPKFVNLASTYKSLAVFGVDWKGDRAWLKRASDSGDVKESIMFLSELERGYFLEMRGYFHSIGGRYALAGSNMPLPFLAMIRDNAELDLICSNDYWDHPQVWKIGDDWNRILEAPFHNRSQLKNLRASSILSKSYYRVANKPFMLTEWNHCYPNEYELEGVPLMAAYGALQGWHGILQFDFNLQSLGVDRIQNYKLSVQPEDVALWVMAAPLFLRGDIKTAPNAVIEGVMEEQYGNLPNYSDMLEDNYHLPFITRVAKSFDRGSSANIDQYDKYYDRVNGAIRSETGELLVNEKYGYMLIDAPRVQGVSGFIGGRGERYDFQAFRCGLSNKHASIFAVSADGANLVSSKRFYIVAVGPAKMSGQRYDAARSKLENAGAGEVLTQVLEGKITFKKAGGNKLQVFPLDVDGTRGKAMELTVVKGALGELDLSKGRTSVYEVEAVKEAWYVPILNFFKSK

SEQ ID NO: 108138 - protein, 106 aa, Unknown
  Obtained from environmental sample
  misc_feature (1)..(106): Xaa is any amino acid
MFPVEIVNQLAHKACGGVVHPVFQILVKQDGVALFVNKFALLVEHVVVIQKMLANLEVPFLDFFLGVLYALVQPGMINRLAALHAYPGHDVLHFLAAKQPHKLVVH

SEQ ID NO: 108139 - protein, 101 aa, Unknown
  Obtained from environmental sample
  misc_feature (1)..(101): Xaa is any amino acid
MEYKLSCYRLFGRFLAGLFCFFLVRRRISLGNRIPKASHALSTKLTFRDFLISSFSSSQSSLLSAGSSTSSIPFLIAARSFSFNPPMGRMRPVRVSSPVMA

SEQ ID NO: 108140 - protein, 170 aa, Unknown
  Obtained from environmental sample
  misc_feature (1)..(170): Xaa is any amino acid
MSTKSVCRGVPCVRVPVLSRARQRSFLPCSRNSPPLIRIPCRAAVAKALTMLTGVEMTRAQGQPMTRSTNAVYIHSLHGPTMNRGGRIATAAAKRKTAGVYMPAKRSTKLCMGARLPCASSTLLIIRANMESPAPAVTRNSKEPDSLMEPAYTVSPASFSTGMLSPVMGA

SEQ ID NO: 108141 - protein, 178 aa, Unknown
  Obtained from environmental sample
  misc_feature (1)..(178): Xaa is any amino acid
MGQKSKADQYGLKELIAEKWDGGKKTIVYVTEEVNQWLKDNGYKITVSREAVRHAIRSYEDKVNDLRKSVEQAKAMAEVLQDQPGTELSESLIMYLSRVLYDHAQTVESVNFEDPSEMFASAAKIATAQAKLSQYRTQAVKALDKAKEKIKAELQNAIKHDPDLLERLCKIVDNAKVA

SEQ ID NO: 108142 - protein, 235 aa, Unknown
  Obtained from environmental sample
  DOMAIN (37)...(234): Phosphorylase family
  misc_feature (1)..(235): Xaa is any amino acid
MEFLYEYILNANKQFGTEPIDIVHSVFHCEPEMIQSNVIIAPLWKPELFNDYFDSVIQDLDGIFKIWTLSKADLKITYIVTGMGASNVIDIVLALGCTPCKKIIFTGSVGALDTHIGIGDIVIPEYSICGDGACRYLTNKRAAENDAFGEKNYPNKELFYKLISTAKEIAKKNGVXCHIGKNFSIDTIIAQFAHIDEIIDMGCNCIEMETSVLFKAAEICGINAGAVFCVSDIHS

SEQ ID NO: 108143 - protein, 192 aa, Unknown
  Obtained from environmental sample
  misc_feature (1)..(192): Xaa is any amino acid
MINDKLIQQLKEYIKENYQLAEEPAEEQELLIGRTMLKKMPGLSSGKRLGKLTQGVQPSGRSFKDLTDTLAKFISKERESETFSAMLERLRKEKGMTAAQLYNGAWIKKQLYSKIMGERNYHPSKNTVFAFGFSLRLNRESMDKLLESAGYLLSNSSIAILVILFCXDQGLYDLHDVNALLLSADQKVVCRE

SEQ ID NO: 108144 - protein, 162 aa, Unknown
  Obtained from environmental sample
  SIGNAL (1)...(18)
  misc_feature (1)..(162): Xaa is any amino acid
MLPPALALLLAASPAAHADPAWAARAEPTTLEEVLVVVNNHIITRKAFQQAVEQQMAELYRRFSGKELDEKLLDAREKTLQELIDTFVLLDVATEKDMLTFVPTEADFLDDLKKRSQTASDTDLERMVKSELGITLSEFLRQQRQAYVIDALLYQEVYRRCR

SEQ ID NO: 108145 - protein, 192 aa, Unknown
  Obtained from environmental sample
  SIGNAL (1)...(26)
  misc_feature (1)..(192): Xaa is any amino acid
MINPAMRIIVVLIMIMLAAGCAGRRAVSWKPVGKVYKKHPQTAGLPASWLFYDDKAAAPLRLTRHGPNMDLIIIATGQKLPVQMPYSELSINAGMRTYEVAEVVMNNLRVTPGVFDLLMEELAPAEIDGKEAFRLSISYSLENGIRRRCLIFGTIHAGGKQYTELAMYAHEDYYFDDDIEDFLGMVKKVRVR

SEQ ID NO: 108146 - protein, 270 aa, Unknown
  Obtained from environmental sample
  misc_feature (1)..(270): Xaa is any amino acid
MAECCLNQGGGEKTLPSRPAPQAASGQPGQNRSKPGAPARLCADPARLPAAKDCLRAGPARLPAGSACLRAGSACLRAGPDARPRAGPECRAARKLLQGGSFWRASRPRGHRGFYRRASGRTKSACRPAQKFSGRHSHRPAYACGVYRPLRQTPGRALRHFGQRSGTRRKTPDRLRVCISRRHTYDAGTERRGARTDDYRPTGKRIVQTFRHRPDELGGQDQPPQDGRRHSHRDGQRRLHRSEGPQGKRRLYPGAERGYLRCVRHAESDS

SEQ ID NO: 108147 - protein, 218 aa, Unknown
  Obtained from environmental sample
  misc_feature (1)..(218): Xaa is any amino acid
MYVAGSENNGERKAVATVWKNGKAQYLTNGETSAVAKSIFVSGKDVYVAGEEQDTEGKNVPTLWKNGQAQRLGLGSVYDNVNSLHVLDKDVYVAGRVQDAQGKWAVTLWKNDQAQQLSHGYDDAGSVFASGNDVYVAGYEHNAQDKWVATLWKNGKAQHLSNGTQNDSANCVYVLGDDVYVAGSNNGAATLWKNGQAQPLPAHENSRATQVFVVGKGK

SEQ ID NO: 108148 - protein, 257 aa, Unknown
  Obtained from environmental sample
  misc_feature (1)..(257): Xaa is any amino acid
MTASNTSTGIVYTVTNGSPDQEYPITFPYIEASDVKAYYLPPGAKRSGKVQLARGADYAVAERVLTTAVSIPVGSSLVIYRETPLTQETLWVDGQAVYPPAIMKADDKLTYIAQEMSQELARAIKISQDEEAAGLTPEALLADIFGARDTSVSAAGRAEASAGMAANSASEASRSAREAVAARDETLRLLENAPGIIGNHYAFFGLKVTDFELIVDKAAHGGTIDLEEYDQWFVLPDXTRFSIEDGRLTMTLRVTAS

SEQ ID NO: 108149 - protein, 274 aa, Unknown
  Obtained from environmental sample
  misc_feature (1)..(274): Xaa is any amino acid
MVFGSLTTGIPDYDSGNVITEEFVNPAVPPSRADPSGAGDAAAYEDDLASPSFAAMPDTGYPAYVLEPEWSGAASGTRSARDIVDLPEYAAQEKKPEETKPSIIDAPESITETKPAAAEEDSEKIAEILPEDDYEDYFEEPEEIAEYPEDEYYEDDFFEEPEEIVEYPEDEYYEDDFLEEPEKTAEYNIIPTDNRPPTNIYGIDPAFIIPEVTRTEKSEVVNSTRIITDSPVVTDSRVETDFSIPKKNELSRGSYYVQLVAFDTVESVETAXTV

SEQ ID NO: 108150 - protein, 202 aa, Unknown
  Obtained from environmental sample
  misc_feature (1)..(202): Xaa is any amino acid
MERVARRGDSVQVQRLEHGAAEALEAAGAVGYAKTGYQAGEHISEVAEEQARHRPVDDVDPVYVARPDDEVGRLRRLDEFGQVLRVVREVGVHLEDVLVAAFQRPLEAGDVGAPQPLLGGAVEYEKAFYAPINHLLDRGACAVWRGVVYNEDVRSRQRFFDLRDDQRDIFTFVVRGDYYQYFRVIHNHKIIYAGQERRFIIL

SEQ ID NO: 108151 - protein, 128 aa, Unknown
  Obtained from environmental sample
  misc_feature (1)..(128): Xaa is any amino acid
MIDRVHLQNALHGALPKGRVAQNDAPVPILNRPGDDLRRAGGSPVHQHHQRHVQRKHRIGAGVELLVLVAHPPSGGDDQRLFGQKLLRDLYRLRQQAAGIMAQVEDQPLYILLEQIPHRLFDLRAGLL

SEQ ID NO: 108152 - protein, 134 aa, Unknown
  Obtained from environmental sample
  misc_feature (1)..(134): Xaa is any amino acid
MSPLNTTSHIAAHIVAKVIKAELVVGSVGNVAGVVVPAALVVHVGENGSHRKPKVSEYRPHPVGVPAGKVVVNGNHMDALAGYRVEVRRRHDHQGLAFACFKLSDFSLMKHNGAHHLHVVRPLAQFRLVPLGRI

SEQ ID NO: 108153 - protein, 222 aa, Unknown
  Obtained from environmental sample
  misc_feature (1)..(222): Xaa is any amino acid
MASVSFSNWNLINDIRTESNNSILTLKSGNNDPHISFPLEKETDISVTDGHTAWLMLNYKSSIKGTLQIFYDFSGYNETDSSRVTVDATTEYETAFTLIKTSKNGYLLKAIRIDPPDNVIFEIKSINISESVIPFSYSSKSSIKQDFNMIMLPYVWGNYDKXVNKHFPEETARXADNLPLESEKPCTVTLDQXIXQSEGNYIYFRIHAVEPGTMTVRYGTIL

SEQ ID NO: 108154 - protein, 160 aa, Unknown
  Obtained from environmental sample
  SIGNAL (1)...(19)
  DOMAIN (4)...(160): TolB amino-terminal domain
  misc_feature (1)..(160): Xaa is any amino acid
MQIAFLIFLSFCSCLYAQQDTITMDIAVSTDKTLPIGVVNFEVDNSDWSKLEELPQKTIARDFNLSGRFSTVELEQYNLYALSRVQAKHYVSGKLSMSGGQAKVECKLYATTSREVVASFAYMSSVDHVRASLHKCTDKVVYQLWGAQGFASTQMAWVAK

SEQ ID NO: 108155 - protein, 223 aa, Unknown
  Obtained from environmental sample
  misc_feature (1)..(223): Xaa is any amino acid
MESNLQQQRHKKEQQAGPDIQTVTQNDGQKTGICPNCNAELPEEALYCPDCGLPIKQRVCPKCGAPASPTADICQTCGAWLLEGKCKFCYADLSSNDALFCPECGKPKTGIPCPHCGTLSIFDFCSKCGRPVTEEAIADLKHAQEEMASQTSSATPEAAKKTFSSNQDARRWYNAQAAAQTAGIEAELAQLETLINNEPPPEEPEEIKMKRPLPQKILFSKSK

SEQ ID NO: 108156 - protein, 158 aa, Unknown
  Obtained from environmental sample
  misc_feature (1)..(158): Xaa is any amino acid
MGRGGVAGPPPDHDPEMVHPGPRAAFIHGHQAEFERRPQVKARGRVHPRVFQDSGLDHGQGSDFLLVGLEDELHRAGQLFPVGGQYSGRRDQDGSMPVMAAGVHKALVDRGVGQPGLLGQGQGVHIGPQKEHRAGPAPFQKAGHAGLGHPLHRQEPEA

SEQ ID NO: 108157 - protein, 134 aa, Unknown
  Obtained from environmental sample
  misc_feature (1)..(134): Xaa is any amino acid
MPRIFRIFFGALMTPFMFWKRRSEKSEGKRRTESQEPENKETMSKHTKNQDIKNKETESKEAESQDTKNKEVKSQGPPSEDSKNRGAMALEKPKMTEDPRSANLRDAKPKMTLMPANRAGAKVQIAIIQRKEWW

SEQ ID NO: 108158 - protein, 117 aa, Unknown
  Obtained from environmental sample
  misc_feature (1)..(117): Xaa is any amino acid
MRPVLINDAKKNMTDKLYVTEIIESKLTSVTGLAKCLSLKLKISKGFRHQIRSHLAWLGMPILNDALYSGTIIGNGYLALRACSLAFADPSTGEDKYYTIPVLTADDLMNGTKEINL

SEQ ID NO: 108159 - protein, 128 aa, Unknown
  Obtained from environmental sample
  misc_feature (1)..(128): Xaa is any amino acid
MGAGKGADMTGKFNHGDLHTKADPQIRQLVFSRIPAGSNFSFNAPVAKASRNNHAVNSVQCFLYVFTCQIFAVYPANLNIRQSFIACVVQALYNGKIRIVKPHIFSDNGDINFLFPCRNFLRHCPPFA

SEQ ID NO: 108160 - protein, 181 aa, Unknown
  Obtained from environmental sample
  misc_feature (1)..(181): Xaa is any amino acid
MRLPRGDNVGVRFVALEHLPHHFDVVAREAPVALGVHVAEFERRLRLSGEEPREVRRYFAGDELFAAHRALVVEEYSGAGEYAEALAVVHAGPVRHELGDAVRGTRVEGRLLGLRRFLNFAEHLGGGGLVEACFGRELAYRLKDVEHPDAVRLGGVERFLPRGRDEALGGEVVELVRSVAL

SEQ ID NO: 108161 - protein, 99 aa, Unknown
  Obtained from environmental sample
  misc_feature (1)..(99): Xaa is any amino acid
MERIRHDAPFKDDRSFVCSPDYHCKSVLTMPLINLDDEVVGVLQLINRKSDRSVTLTSADQVKAYACPFSTDDIGVIRFLSRYAALSIDRISLYNSADI

SEQ ID NO: 108162 - protein, 244 aa, Unknown
  Obtained from environmental sample
  misc_feature (1)..(244): Xaa is any amino acid
MFFMDYSENCLFASINYRVIDTENSIHMGSIISDVNDALKKIQEFSKAKGVTIKDFILTGHSAGGHIALLYGYKHFQENEHARIAACVSLAGPTDFTDDSGWSSMTMWGKDVEERLAFLSWMSSRLTCHPIALKQRNWTKQADYPEFEKYLMEISPIAHVSKDGKTPPTLLVHARNDDQVPYSNALRLKAILESASVPHKLITPGSSGDNHMLGGIVYNHNEPITFNGQAWVKEAKEWMEAYLR

SEQ ID NO: 108163 - protein, 257 aa, Unknown
  Obtained from environmental sample
  misc_feature (1)..(257): Xaa is any amino acid
MYEYGLASRQAGDANCNGKKLVHSVEPQRPAVGNSRYRRDRVGSVDRGRPGRADRSPVGEPHGGHHRPVQRSVSGADRQDAGHQRPLLQKTAADQHRFYLARAQAQRQSEDARPPAHRAGGGGRNLSGAPFAHAPPSPHRRDADRRPGQLRLPGVLRHSAAGRGSRRRGVKPPPLYNEGARVRRRPGRKHVHPPQKRTDGIQCGGFGQDGVFLHPLRKRQRQEGAVGADVFCGYTVTAEKGGGSFTTARLPVWEVHC

SEQ ID NO: 108164 - protein, 178 aa, Unknown
  Obtained from environmental sample
  misc_feature (1)..(178): Xaa is any amino acid
MEKKLNAVKYFWLIVYAHTIAYCFAGFVGLFVYKELFARGIISSFMRSADDPIVALEPFLQIFRGPIIALIIFPVRKVFFEEKHGLLKLGLIVIGFSLLSTIGPVMGSFEGYIYTTIPFAYQTWGYPESIIYVLLFIGILRLSKKYGHKKIFTILSIIIMVMIGLIGIFGYMAGKGYI

SEQ ID NO: 108165 - protein, 272 aa, Unknown
  Obtained from environmental sample
  misc_feature (1)..(272): Xaa is any amino acid
MAWATIPCGLTAPLALWRYPAFSPLSRFSCPGSSTRQNRKGRYGAGMKTEFSCIICVADMNITNALDQCLAELTLPEVFVQRAKQMSLEDRHGFLGRQITNLEESRAMIYRIYVPTEYETGLVNRIVDATDLKMGGRGCLIVQHIDSYRYNPLSFPSDITEKLDKLCGKLGKASQKQHALISCIVPRGEGDAIAEALLELGICVPIIFYGTGVXLRDRLGLLRITVPIEKEIIWLWFPVLTRCLWKKPLFXGRALTFRVEAFCTRIMFMPRW

SEQ ID NO: 108166 - protein, 210 aa, Unknown
  Obtained from environmental sample
  misc_feature (1)..(210): Xaa is any amino acid
MAVPGDYEAGGGQFPETHGAVGVEAGGADAYFSSQPQAAAVVEPGRGVDHDAAGLHRPLEMFSPGLVAGDYDLGVVGTVAGYVGQGGLVVGHHLHGQDEIQKFAAPVLFGGRLGLGQKFFCFRVGPEGDPQGGQALAQGRQKSFGLVGVDQEGFQAVAGGGALGLAVDRQFGGHLQVGPPVHIEMADPLEMLKHRDAAVFADEAISPRPI

SEQ ID NO: 108167 - protein, 236 aa, Unknown
  Obtained from environmental sample
  misc_feature (1)..(236): Xaa is any amino acid
MQSVSGRRVGGTILILPSQYYEENLYPLQDGVMNILQHSDTNFFLTGGTALSRAYYNHRYSDDLDFFVNQSQTYDDQLNKVLALLQENGYIWDTNNEYTRAKNFTTLKVRKDSDTLLKLDFVNDLVPHYGEIIETDLFYRTDSIRNMLSNKLSAIFRYAAKDIADIREIALHETVNWPTVINEARNKEAGLELVYISEILTSMPESEFETIAWTKKTSWQEFRNDIDRIVYEMISG

SEQ ID NO: 108168 - protein, 186 aa, Unknown
  Obtained from environmental sample
  DOMAIN (3)...(166): Phage integrase family
  misc_feature (1)..(186): Xaa is any amino acid
MQIGHILAMVTGIRAGEIQGLRVQDLGKDCLYIRHSWNFMDGLKTTKNNECRTVEVPFPAIIQDLLVLAGRNPHGASMDSYVFWAELSADKPMEAEIFLRDLRAALVKTGMSRESAKAYTFHSHRHYFASYMRERVNEKLLQSQTGHKTLAMLEHYSDHRIAGDRQRIQQAQIESFGGLISSVANT

SEQ ID NO: 108169 - protein, 118 aa, Unknown
  Obtained from environmental sample
  misc_feature (1)..(118): Xaa is any amino acid
MRLAMQATHSAASSPVQILLSYSRYFFLTSTGDRFGITTFAPARTPNSLPFGSTVPRAVVAGSRRFGCIRRKIARRFSVRCKSPACLSLKGVSEWGIKGPMPTMCGFSSFIKHRSSTR

SEQ ID NO: 108170 - protein, 138 aa, Unknown
  Obtained from environmental sample
  misc_feature (1)..(138): Xaa is any amino acid
MRSCDSEMASSVPSSPSYFLGTASKYMSSPAASSPTATATPPAPKSLQRRIIRPTSGSRKSRCILRSVGALPFCTSAPQVCMDSSVCSLDDPVAPPHPSRPVRPPRSTTTSPASGSRRATCDLGTAPTTAPISMRLAT

SEQ ID NO: 108171 - protein, 248 aa, Unknown
  Obtained from environmental sample
  misc_feature (1)..(248): Xaa is any amino acid
MRLGEQAVEQAHFGRHGLRSRYPVNGTFHLAGTATSATSFGVISTTQFFHIALFVLNHFFAFNDIRILQAHFVTRRKTEIFFRRVFHEIVVFNVKLARERHFTFAGAFVFGIVYGVHHFHLSFGVVCNHYFHRIEHCHIAVGAFVKVFAHAPFEERQVNSIVALGHAYFFGKHTDAFGRVTTTTHSANGWHTRVVPACYGICFYQFQQLALAHYGIGQVEACKFILVRREYFKLFDKPVESGRALGRI

SEQ ID NO: 108172 - protein, 140 aa, Unknown
  Obtained from environmental sample
  misc_feature (1)..(140): Xaa is any amino acid
MYQIGRDEHGVAVAVEAESGGHGFGVGGQNLFPAGQGRGQHKQARARQVKISEETVHGFELVAGADEQVAPAGSGRQAAFRRPFQGADRGGAHGHHRPSRPPGLVHGFGRLGRHADVFPVKAARLQLSLGQGGEGAGAYL

SEQ ID NO: 108173 - protein, 111 aa, Unknown
  Obtained from environmental sample
  SIGNAL (1)...(25)
  misc_feature (1)..(111): Xaa is any amino acid
MFSRLGPAGILMAAALGFTAGLVFNYIFSLIFVFKQIDEKAKRHKFRSFALFTLIGVIGLLITEFCMYAGISLFGPKWYLLVKIVTAWIVLLWNYLGRKFFIFKGAKLGRD

SEQ ID NO: 108174 - protein, 404 aa, Unknown
  Obtained from environmental sample
  misc_feature (1)..(404): Xaa is any amino acid
MQTDKLRPSAQGVKLHFLVDAVVRNGIGKGNPRAKGGEKRGGSTAYAAKTHDADSFPVQQKTHAFFPASGAHFTVHTRNAAQQIQGVGQGKFGHGLSRSVRRIAHGDAFFLGRSKIHAVHAGTATGNHPQLRAGVQNATAEFFRPRGHADAALQNGYGFILRQGAAGFIQNIADAVPAQQRQRLIAVVRKAGCCDGDFHIGPPFGKRLPAGALQERVRGIGVQGGHAGNKIADLCFARLKRFHAPRGDALLAGIDGFDRIDKTSVLLEAEIQMRAGGPAGHAHKADDLALMHTDARCHAPGIARQMRILRLQTGAVAYGNRLAVAVQPALPADDAVAHGLDGRTGGRGVINAFMRTHIMKNRMHTSLAIPGGNAGKGQRRLEQHLAQALSLAVVMACMAGTAGK

SEQ ID NO: 108175 - protein, 267 aa, Unknown
  Obtained from environmental sample
  misc_feature (1)..(267): Xaa is any amino acid
MSAACYNYCQTGEFKVKDAKTALRDLIRETDKLANLYNHRIEQVANMGEDAILRLLNRNKDLPFCSELLDLYAQNSRETVEVYKFCFYIIGHLIFNKNQMDRDSSLIYRFYKNKKEREKIIEEVFSNEENLLFQRKILQRGIDESGKADKNRIEIHSDFKRKYLMGIMRERKLDDVIEKDKIAGKRMFFNQDNEKQIKDLRSILETVKLEEVRSRLRESGSKTGFTCLFMGHPGTGKTEAALQIAKETGRDIIKVDMSALRSKWGGG

SEQ ID NO: 108176 - protein, 177 aa, Unknown
  Obtained from environmental sample
  misc_feature (1)..(177): Xaa is any amino acid
MQRGAKGQPQKLSSIDGTLPGIFSSLVPLFDLSGIALISAFVYGCKGEKKSLDSPSSTILPAYMIRKRLQNFLIIERSWEIIKTDILELLFICARSERIRSWLSISRELDGSSASRRRGRIIAAIAAITRWHIPPESWCGYASKIFSVFSNPSNVNISRAFCLFSSLSLLPFNSEFP

SEQ ID NO: 108177 - protein, 173 aa, Unknown
  Obtained from environmental sample
  misc_feature (1)..(173): Xaa is any amino acid
MLRHGPTSARRALFITGFCFVSHPFNRGNDVRFELLPQIFDMDVNNPFVAEVIVAPGPIKELLAGQNFVLIHHQNFQKLKFTQGQRNALVAFKGCVTVCIKSDIPDLSQAGRCFAGSTQQGFYMFDQYFRRKRLGYVVVGQTVKAENLCVFVAXSREHDDRLFPVPGIVSDQA

SEQ ID NO: 108178 - protein, 157 aa, Unknown
  Obtained from environmental sample
  misc_feature (1)..(157): Xaa is any amino acid
MRRSSTDALSRGFAEYAVYLLAEPVRRPPEMGXQNLTDVISGRNAERVQHYVDRRAVRLVGHVFDRHHTRNDTLVSVAAGHLVADLELALHRDEDLHHFEDARQQVVALAYLFHLVLELGLELFDEIVVVLHHSDERLLRLVARQLYLFQLGGGELV

SEQ ID NO: 108179 - protein, 131 aa, Unknown
  Obtained from environmental sample
  misc_feature (1)..(131): Xaa is any amino acid
MAALYHSGFHRLPYAFGYGHGALLGGFGEHYGELLAAVAGGEVGRPHGALYAAGDFAQYKVAYRVSISVVEVFEVVYVCEKHGEGAPVAFCAFKLARRYLLEGAVVVESGQAVGCGQFLHFKVQHRPCDGN

SEQ ID NO: 108180 - protein, 241 aa, Unknown
  Obtained from environmental sample
  misc_feature (1)..(241): Xaa is any amino acid
MPMYIIHHNEKIGGGAGWGAEDQLLRQLSYAKNDVPSYKGSVFNSYSGLLENKMGTTDTLIKFFNKEINEESLFEDLAMLAPKSLNYSTNDAIAVFQGTYDDNFDVYFNDGKISLNEAGYFYIEQPLKVGMNYFTIKHKGKVISYSIERKVISLYSIDASIANGKVLNVEGGTSVVISAVAYKGATVTASLGGKAIKLTQQEANLDETDLRASYALFTGXYKVXGRNNRTGSGFGDYCRYR

SEQ ID NO: 108181 - protein, 190 aa, Unknown
  Obtained from environmental sample
  misc_feature (1)..(190): Xaa is any amino acid
MNIRFAAGFDNALFSRVGSRVQQIFLYGAVKKVSVLGNESDIGTQPGQVILPDIPPVKEYLAVNHIVQAGYQVNDGGLASSRRADNGDRMSRLDGKADIFEYGLILVIVEVYISELHKAVHCIGGNRAGPVLYLNRHIVILEYAREYRHGSDDIDLHIKEHIHRPVQPVQKRHHDRYVADCQGPCAESQH

SEQ ID NO: 108182 - protein, 214 aa, Unknown
  Obtained from environmental sample
  misc_feature (1)..(214): Xaa is any amino acid
MIKKYGKDVRNKSNALEYGERLLFMKRVSIELFGHDGYAYIAIDFDRQIDEQKRYYRKAVASRRKAKKEVAADENETSEDETNEDNMGFFVLVSSEMLDTSEVMPLYYMRRTIEQTFDFAKNDMALVPIRTHTDETFRGHLMLSFMATVLLITVKRVLKTRKKTSELPAAQALKAMRYIKCDVFTRFIVTSEPSKYANLIINELKLSVPGMINL

SEQ ID NO: 108183 - protein, 272 aa, Unknown
  Obtained from environmental sample
  misc_feature (1)..(272): Xaa is any amino acid
MKLKALSHYNSDLDTRFGDCILVYDSNSLIVFDCGHTKHTGSVESFLYSHPAINQIYIVVSHNDSDHTDGVCGLLEWLNTRGRYSVNIYSHQYLKHVDSILDKIDDGRRNRESLKKALLAEFDNIKAIIETAQAFGFSVNEALNGTSVGTCTIVGPTVDEFTDVAAKAVDSRESDKIGEGHAEETVMNAASIQLMCKLDNAAIILLCGDASPEYLHNLNSYSIIQLPHHGQLDDAQAIFEKLGGNSYIKDYLISDNTGSGANSGGSDKLVHT

SEQ ID NO: 108184 - protein, 108 aa, Unknown
  Obtained from environmental sample
  misc_feature (1)..(108): Xaa is any amino acid
MVNADVNLLYAGRLFFRGVRNFGDKLVLFVDALHNFAQAFECFLSNVRTLFGFFNRVFNQVCGVFRRLSALRGERADFFRDNREPFACLPRARRFDGRVQRQYVSLES

SEQ ID NO: 108185 - protein, 159 aa, Unknown
  Obtained from environmental sample
  SIGNAL (1)...(23)
  DOMAIN (18)...(109): N-terminal ig-like domain of cellulase
  misc_feature (1)..(159): Xaa is any amino acid
MKNICLLLLIPLFAACLTNISEQNDSWIRINQVGYLPEDIKVAVFISKNSGKSKSFHVKDVQTGRIVLKGEGVSANAERWGMQQAMRLNFSTLKTDGKYCIECNGVQSPTFDINTNVYDGAADFISNYMRQQQCGYNPXLDTVCHQHDGLYVDHPTLTG

SEQ ID NO: 108186 - protein, 280 aa, Unknown
  Obtained from environmental sample
  misc_feature (1)..(280): Xaa is any amino acid
MYCYYPLDKGWPARASTLVQPGKAGFAWDYAYDDYFPYQGGLGGNTNGEPFASMRDVRRHGQDVILTLTVDCAVSDEHLVQIAKDLIPFGRLMLRINHEATGTWFAFNKRYTYQQVADFYVRFHNIVKQHAPHISTILCIGGALKTKSGKLDYEDEFAQAIVEADIWSSDTYLSLHWGWPFDIAEPGGKSHKRSTNKTILEGLCFDFERFVARAGKPKPFVLSEINADGDVNGLMSRLKHWSIFTAAYRKKRLILPVLLFTSSETEEDLDSKCKTPIIPT

SEQ ID NO: 108187 - protein, 141 aa, Unknown
  Obtained from environmental sample
  misc_feature (1)..(141): Xaa is any amino acid
MRRRSAGADDRIVRPLQTVRHRYAARRHIGDHHRYKEWGDAPWPPIQQFYMLGLHGVQPAHAGAYYDADPSQILVREVETGVLKRHTRRDKPQKYGPVVAPYILGIHIAVEVEIPDLARDLRWVIGNVKRRHAVYTGTPLA

SEQ ID NO: 108188 - protein, 185 aa, Unknown
  Obtained from environmental sample
  misc_feature (1)..(185): Xaa is any amino acid
MESRYPRELLAHLREERGYAVEEKQPGIYIVKGDILPIQIIDSRKLSADENIWLRDLDNRLDVPELKRITAEIRRLGKAARIKAYLDAIIRANKKSLREAGRMSDDTLTLDQALEEGGFVARWEARGEARGEARGEARGEARGIAVGEEKKAAEIARNLLKNGFSVEQTALLSGMDVAKVQTLYN

SEQ ID NO: 108189 - protein, 122 aa, Unknown
  Obtained from environmental sample
  misc_feature (1)..(122): Xaa is any amino acid
MVLVFQLQRIYCRGSADKGYPTASYNALFNSSTGCVQGIVKAVFFLLHGNFGICANFNHGNATGELCQAFLQLFAVVVACGVFNLFFDLCNASFYILGFPSTFYYSGIVLVYDYGLCLPKNA

SEQ ID NO: 108190 - protein, 322 aa, Unknown
  Obtained from environmental sample
  SIGNAL (1)...(22)
  misc_feature (1)..(322): Xaa is any amino acid
MGKKPIILSLFLFFMHSIYAYAQNAILFPRLEPEPKAYEYFRLNRQKTSLSWKELAEISLWASGNLSEANLEKIRTVVETLNKTSVMPSSGREKAEFILTYMHRNILKSYSLYQSRIDTIFSNGSYNCVSSAVLYMILCTSAGIDVSGVVTKDHAFAMVHINGEDIDVETTNRYGFDPGNRKEFNDQFGKTTGFAYVPARNYRDRQTIGKIELISLILINRISDDERKNLYSDSVPLAIDMAAMLLGEISGSVSKTSSQNSLFEDPNIYLMDRIFNYGVWLLRAGKEEDYLMWAAVASPVFPDNQRWQEFNMAAVNNKISKF

SEQ ID NO: 108191 - protein, 112 aa, Unknown
  Obtained from environmental sample
  misc_feature (1)..(112): Xaa is any amino acid
MENPPAPDLHPRGYLREERASSAFYYRGNRETTRPRNNRRHRRGPASDVGGAVFSRREAENVYQLGRAWNHGLRPWRGLRRESGEPRKTRGAFYRRRQFQDELRRDGDLKQQ

SEQ ID NO: 108192 - protein, 115 aa, Unknown
  Obtained from environmental sample
  misc_feature (1)..(115): Xaa is any amino acid
MTARPRPRRTRSSSTWDSGPASTPSRKSMETAGRSGQWACRARAADGAWKATRQTCRNRPAPAPIXRPGTEPGGRTCRRKTGHHRXGRTRWFRAKSSPRTAHRWTRWSRSSKRWG

SEQ ID NO: 108193 - protein, 139 aa, Unknown
  Obtained from environmental sample
  misc_feature (1)..(139): Xaa is any amino acid
MSPLDTAPHIAAHIVAKVIKAEFVVGSVGNVAGVVFLSAVVVHVREYGSHGQAKVSEYGPHPVGVAASKVVVDGYNMNALARYRVKVRSGHDHQGLALAGFQFGDLSLVKHDGAHHLHIVGPLAQIPPGGLARKGKAFR

SEQ ID NO: 108194 - protein, 224 aa, Unknown
  Obtained from environmental sample
  misc_feature (1)..(224): Xaa is any amino acid
MHLWQYQFPRPVRAYDPADMRGGQRKAGDGGPKVRVFGVGGFKKSLSGWQLHKDVPNRHRRTLGPWHRPNVPDGPKLTAQDVAITIALRAMQVKARHASDAGQCLPPEPIARKRRQVVSRGYLASGVALERKVQVVPSHAATIVGHLQQLATTLFPSDVNRSSPCVQRVLHKLFQHRSWPFDNLSSGNLICHVIGEDADAGRAAHLPMKILRYHSVGQESVAGT

SEQ ID NO: 108195 - protein, 186 aa, Unknown
  Obtained from environmental sample
  misc_feature (1)..(186): Xaa is any amino acid
MQFPVSLKYVDLIKTVTALNDDNARYKIKMTARIPIPELGDLSWPFEHEGKIPLMRVPNITVASAPRVSITYGTGRIPVPTGGKVEFALNVKNNSNVAVTINDLSCVLKINNTSLPRGGVEGKPRINAGATERIPFSFSLATTDITKVGLTVLTGGSFTYNLSGNYKFGIPEFPLLNEVGNSFTLQ

SEQ ID NO: 108196 - protein, 195 aa, Unknown
  Obtained from environmental sample
  misc_feature (1)..(195): Xaa is any amino acid
MLHRGARLNVVLRYLLGRDGAALGQLANLLGHNREALALLAGLGCLYCRVQRKQVGLVGYLLNYADGGGYSAGGLRYLVHRALGGGACHVALLRRLQCRVKLGKGLGGALAHLVNRGRQLGHGCGHALGVAPLAFGAPGYLGGGVGHLLRRCRQLRRAAGHAVYALVHTGDYVPQVGHHVAQRVGYATELVTVSA

SEQ ID NO: 108197 - protein, 184 aa, Unknown
  Obtained from environmental sample
  misc_feature (1)..(184): Xaa is any amino acid
MPIDQIGTRIDIGIGEKVIVVNKENPFVAYLKRGKIYYIDGYKFLVLGGALSTDKKIRVKGISWWKEEYWSKKEKENLFELLKTEKEFDFVVSHTGAINGIIDAMGIPHRHGKMEDEVGMLNEKIDKIIKYRAWFCSHWRWDYINSHDGIFFDELDKNYFYIYSHTLLLEKNKLTVLKDWIQDI

SEQ ID NO: 108198 - protein, 120 aa, Unknown
  Obtained from environmental sample
  misc_feature (1)..(120): Xaa is any amino acid
MNPARRAPNYWGRGGNLSGNRPPCKARSGRRFSAIRRACPCCGGSRSRRRRRGCRRRSAGGKRAGGRGRNSPSARYVRISVPIHARTATPRSRRGRPRCRCSARRGRRQSYAPSRQHPHI

SEQ ID NO: 108199 - protein, 121 aa, Unknown
  Obtained from environmental sample
  misc_feature (1)..(121): Xaa is any amino acid
MILREPSLPPGWYPRQREKIEEFLEPFKKAKGSLPGAHAAVAPHAGWYYSGHLAALAASSLGSGAETVAVIGGHLPGGAPVLAAREDGVKTPLGAMMIDNELREAFEKLISRCPGDNSRPI

SEQ ID NO: 108200 - protein, 298 aa, Unknown
  Obtained from environmental sample
  misc_feature (1)..(298): Xaa is any amino acid
MKDVRRHGQDVILTLTVDCAVSDEQLIKIAEDLRPFGRLMLRINHEATGTWFAFNKRYTYQQVADFYVRFHNIIKKYAPHIKTILCIGDDHPDEKGKMKCEDEFAEAIKAADIWSTDTYVALHWGWPFDIAESGGKSHKRTGNGESFSGFNYEYGRFMQRAGGKPRQFVISEFNADGDVTGSFEQAEQLADFYKRLPKEAPCITGVTFYQFRDRGRLGLEIEDPNNQNIGCAQPILEEYKKILNMEPYLPVMIQNEIAAFPAQLRWGGSEDADGLLISLHLFKPRLLRNYIFRRRYRS

SEQ ID NO: 108201 - protein, 226 aa, Unknown
  Obtained from environmental sample
  misc_feature (1)..(226): Xaa is any amino acid
MRRSPRGGLCPRRGVLTLCLERRRGLPGRPALPRFPQGHRPLSRLALHSPIHRSGRNPRPHGHKVPPRDGQTRPQQTALRERKRVAPRIRPRLRLHKQTRRANKQNRRRHESPPHSGGPIRRGTLRTLVVRGTGVAELPDTQMRHRPRHFRSYNAVGIPGAAPREPNLRPRVLKLGRRRILAGMAKRDKRVDIPAPAPPGRQDGRVRKGVSLGRLRTGTEGAKPDG

SEQ ID NO: 108202 - protein, 100 aa, Unknown
  Obtained from environmental sample
  misc_feature (1)..(100): Xaa is any amino acid
MTSEFMMSPVTVTAPPAKSLTFSIPAASTPPPHSTTATPPTPRTDAPAVRSPPHRTDAPSMPPPTQSDPVTTMVTPDRMLPVIFMSPVNDTRPAALSISP

SEQ ID NO: 108203 - protein, 102 aa, Unknown
  Obtained from environmental sample
  misc_feature (1)..(102): Xaa is any amino acid
MNEPLPFQGDSSSLNNATVAEPPEISANPIAASSPLPLIIPTINTSPPPVIPVMVIFMPPPPLLSSSFLHPTIIIPNTSTITSIPIQNLFVFIFSLAVFPAV

SEQ ID NO: 108204 - protein, 156 aa, Unknown
  Obtained from environmental sample
  misc_feature (1)..(156): Xaa is any amino acid
MLGYGDDRYGGDRRAVRIFRVSRIRQIRRVRRVVRVDQIRRVVNVRRIVRVDQVRRVVNVRRIVHVHQIRRAVHVHVRRVVRVDQVSRVVNVCRIVRVHYRRILQVYRIIRIRRISRILRPRPPSEAQCHYGDTQSRSLHLSCRVNCAHGNKPPCF

SEQ ID NO: 108205 - protein, 138 aa, Unknown
  Obtained from environmental sample
  misc_feature (1)..(138): Xaa is any amino acid
MRSCDSEMASSVPSSPSYFLGTASRYMSSPAANSPMATATPPAPKSLQRRIILPTSGSRKRRCILRSVGALPFCTSAPHVCMDSSVCSLDEPVAPPQPSRPVLPPRSTTTSPGSGTRRTTCDLGTAPTTAPISIRLAT

SEQ ID NO: 108206 - protein, 155 aa, Unknown
  Obtained from environmental sample
  SIGNAL (1)...(47)
  misc_feature (1)..(155): Xaa is any amino acid
MLTTLFLCYLLFVTCYLLSVICYLLFSAFLLKMREFHTETCPSLAYAAKRGHKAEHLRHGRLGFYFVNVGPCVHAENLAAALGDKAHHFADKFMGADKVNSHDRFQQCGRRGAAGFVKGHAGAGFKGEFRAVQFRIANVSDGRRNINAGVAHNDS

SEQ ID NO: 108207 - protein, 130 aa, Unknown
  Obtained from environmental sample
  misc_feature (1)..(130): Xaa is any amino acid
MVHRFFLGGVMDSYLEMLPLNGIAKYSGNQPKDAIPFAGYPRQHPSEKNKLLLVYDPLGLAPTLMEFKIEDVLFVEDIPSAVTEEGEGVPLVKLWLRRGAHGVILEPFEVNNPIQFANKSREIRERFLGA

SEQ ID NO: 108208 - protein, 281 aa, Unknown
  Obtained from environmental sample
  misc_feature (1)..(281): Xaa is any amino acid
MDAELIAYIKEKYPQVICAIATCWEEGPKAYRTCNNSWYTLFDGGPWNPWIPSRQNTHAPAANESEDSGIVAIPHLSRDLLACFDGNGSNFGTHPQNVLRGMIYKGGEYPYLFNLIDQYRHLEKYNGGEAYNMVFVGPGWMNKAGRWEVPFELSVKSYEDCLAYYGKLKKEGHCVDMTMAEYAGYFRTKKSYTTPECALWKDILYGSNKQLFWYCDPFMRACVDMNQGGALIDLRPYAAKINWPVGIGTKHVQDASYPFLVQSIYRAGYFTHYAGEGTFAV

SEQ ID NO: 108209 - protein, 130 aa, Unknown
  Obtained from environmental sample
  misc_feature (1)..(130): Xaa is any amino acid
MECTELKEIKFNSAAVIGEYAFKDCKNLSKIDFPEVWLIENNAFEGCEGLENVFFEKASKIGSEAFKACAGLKKAEFHVSQKQSLPNLFSGDPPVFPAPVNPXHFADPGYLPVFDYVIFYPSVFTGCKAL

SEQ ID NO: 108210 - protein, 230 aa, Unknown
  Obtained from environmental sample
  misc_feature (1)..(230): Xaa is any amino acid
MGFIQKTSNSTLSFTKPNTDYLIREILRFIGHGTSHENIRVDKSIFDTTFDERKSFLRGFADVTGYIRKSNYFFQTYKHRVYLEVPHNWGLVIDVCNLLKSIDIPVQAIDWAHPNIRDGKLTKYNEGNTNFWKKEHQIKIWANEFEPVGFGILHKKSALTTFADELKLGLENDGKDVLSVTHKFYWELSGKSKSKPKHPAENDAFIHQSIRGKHFDSWREIAKELGYGEN

SEQ ID NO: 108211 - protein, 460 aa, Unknown
  Obtained from environmental sample
  misc_feature (1)..(460): Xaa is any amino acid
MAALLGFFTFPAKINAQNAFPRIEPDAKALDYYRLGVQSGYSWTELAQIGLWASGDGNFSGMDKLKVIVVNLNSAINPDLSEKEKADFILNYMHKNILKNYYLYQTRLDTLISNGSYNCVSSAVFYIILCKSAGINASGVMTKDHAFVMVHINGQNFDVETTNPYGFDPGNRKEFHDSSGKTTGFAYVPPQNYRDRQTISQIELVSLILNNRVSDFERANNFSASVPLAVDRAALLLGNSYTKTAEAATSDFLFTDPRKDLMDRLLNYGASLLRSNKEEDGVRWAVFASSIYPDVRWQEFLLTAVNNRITRYVREKKIQDARNFLESQKTNIPEADYTQFEILIVDAEFFNKVNNFKTPDEGKEIVSNIELARTSGKLPEKRASELLTYTIQKTAASLCAPPGKDWRAAIRYLENALSKYGANRELEQSLRTYKANLVADTTTALRLNGTRRIMQKRSVF

SEQ ID NO: 108212 - protein, 115 aa, Unknown
  Obtained from environmental sample
  misc_feature (1)..(115): Xaa is any amino acid
MPFPYVFQYRVSYAAYQIRRHFNVVYFFKVGFYVPVGHPKRIHRDDLIVEQRQPFFVFGDYDWLERAVPIPRHFNCRALIFHQHGLFCMPIPAVPAVVPGVGIFYIPKMFRHFRF

SEQ ID NO: 108213 - protein, 149 aa, Unknown
  Obtained from environmental sample
  misc_feature (1)..(149): Xaa is any amino acid
MGRHCDQRRKPRANLASSISSLRLRKMEWQKFTRQSESILVGQQIFYIARYESSKIFTLLYFDGIGSQYCVKRFNLENAPQTTEFSLLTDNPESSMLLFFDEEVPMAQIDGKEYNLAEYGEIRGYKAIGSKLDFRRIKKAIKIALLTLE

SEQ ID NO: 108214 - protein, 182 aa, Unknown
  Obtained from environmental sample
  misc_feature (1)..(182): Xaa is any amino acid
MKRDVPDGPFCAEHVPENKAVVAVRRLGECREFAVAPIKFAAVHDDAAERRAVPANPLGGRGDYHRRTVLYRTEKKTARAECVIYNQRNIVLFGDGRNGIKVGNIQLGVADGFQINGFCVFVDAFFKLRRFVVRRKANFDAQAFELRFELVVGPAVQVRSGYKIIAGLQNVVQCNKLRRLPR

SEQ ID NO: 108215 - protein, 377 aa, Unknown
  Obtained from environmental sample
  SIGNAL (1)...(24)
  misc_feature (1)..(377): Xaa is any amino acid
MSISRNMAFSVWQCVLAIFSCAAACGSRRVSERRVFAQHHLPDDGGLGAAFRPFLFRHGVMHDARPGLPVHAPAAHPEAADGDPEIQVNGVLVEANPSHGAGVGAARAALFFRDDLHGPHLGRAAHRTCREGRREHVQRVQAGGESGVDARGQVHDMGEALHFHETFELDAAGPGDASEIVASEVHQHDVFGLFLGVLLQFIAEQDVFLGLEAARPGAGDGAQAQVVGLAGDEHFRRSAQHDSGPGIRQAHVKHVRRGIDPAQPPIQAEGTFRQGRAEGHGKHHLNGFSLADQFFDLHGGPCVVLLFRQGGGGCGRPAFRGAHGRQGLYRLTVQEQFEAGDAVVAVVEDDEGTGQGEAGFRFVRGQHAGDFGSTRPI

SEQ ID NO: 108216 - protein, 212 aa, Unknown
  Obtained from environmental sample
  DOMAIN (21)...(197): Phage integrase family
  misc_feature (1)..(212): Xaa is any amino acid
MSGFKGGEVKRSILTDHEMALLANYKHWRSRRGYAAFMLASTSALRNSEIRALRREDLAENILYIKHSHNNRDGIKTTKNGDERIVYILPEVRALLLELLEESPYKDAEKPFIFYNDLHPDKPCDICLFPDNLKIAMANAGIELAERKIDFHSLRHYAAKKTADAEGLRAAAKVAGHKTLSQTQHYADHVDESEMLEMGKKAENIFQFRKMA

SEQ ID NO: 108217 - protein, 134 aa, Unknown
  Obtained from environmental sample
  misc_feature (1)..(134): Xaa is any amino acid
MTEKPVPEVGAFDCFNPHTRTGCDFDLSSFGGIVLVSIRTPARGVTLQSRRKAGFFSCFNPHTRTGCDALDGQACGTVIKVSIRTPARGVTCTTPAGNAPCASFNPHTRTGCDLVSSIIIKEVTMFQSAHPHGV

SEQ ID NO: 108218 - protein, 198 aa, Unknown
  Obtained from environmental sample
  misc_feature (1)..(198): Xaa is any amino acid
MEAGADFAYLVQKYRPAVRLLEEALFVARRAGEGPLGMTEQLGFQQGFSQRAAVYRNEWTVLPVAALEDRSGHQLFAGAALAYYQDCAPALLQGGDFLVHLHHLWAGAYDRAVRSVEFGPADLCASICTAELQGAPYECLELFVVPRLGYEVECALADGLQRPLHSPEACEENGLNAERLRYAEQVQTVPVRLKVDVG

SEQ ID NO: 108219 - protein, 104 aa, Unknown
  Obtained from environmental sample
  misc_feature (1)..(104): Xaa is any amino acid
MVKFHSEKKAYATLAVHPNSHPFDSAVIFSNGNNKVTRWLNKEDERIYYKNQVNAGIHILSTEFLKSCPQSKEKVDLDRDMLKPSISGGKILNLSKARRTRSKK

SEQ ID NO: 108220 - protein, 128 aa, Unknown
  Obtained from environmental sample
  misc_feature (1)..(128): Xaa is any amino acid
MHYLAMLPVSSIAKYSKGHPGDGIPFTGYPRANPSEKDKLILVNDPLGPEPVVLEFKLDDILYVEEIPSAVTKSGEGVPLVKLWIKRGAAGMIIEPFEVDEVNTPVQLAGRAQAIKERILQTGTQAAH

SEQ ID NO: 108221 - protein, 376 aa, Unknown
  Obtained from environmental sample
  misc_feature (1)..(376): Xaa is any amino acid
MIRSRSRCSSWNNISSLSVKKFSILILLHSGLVRFDHQGDNLVQIPHYSVMGNAENRRFRIAVNRNDPGRSVHARPVLNRPGNTAGNVQLRPDRGSRLPHLMFLADKALINGSAGSANFGSQSLGKFTDKGEIFLASHSHAAGHDNLRAFKVDGLFFHNTLDYLAREIFRVEFRGNIHDFGLARSIGRCHSHNALANRRHLGLFLGRHDCGDNVAAKSGAYLVKNILVFGILLFVISDLQIGTVRGQSHFQVGRHAGSEVAALGGRAVQHDLRLPLGDHLYHQLAVGNGRVKFEAGVFHNIHAVGPVTGKAGGFPRHLVAEKRGANLRPQLVREFTCLGHKLQAHLGGFPTVLLNVYHYAVFCAHFSPLNRKYDPR

SEQ ID NO: 108222 - protein, 438 aa, Unknown
  Obtained from environmental sample
  misc_feature (1)..(438): Xaa is any amino acid
MDRALASGDSSSVNFEKIKAAVHAVNNSTDLPSSKKEKAEFILTFLHLNILKSYSLNQTRVDVIFTNGRYNCVSSAVLYMILCDAMGIETSGVITRDHAFVTVHINGEDIDVETTNRYGFDPGNRKEFHDHFGTLTGFTYVPARNYRDRQTISRIELVSLILNNRISEYERQNLFSQAVPLAIDKTVLLLGESLAVNSSFHSDGTIFEAPKKDLMDRIFNYGAWLLRANREEDCLRWAEAASLKYPDAHRWQEYTMAAVNNRTARYIRENRTADARNFLENNRNVLTTANYAQLDSALTDAELLRRANQISTAAEGDAVISAVERAHSKIGEKRALELRTFAIQKTAAILCASPARDWRAAIQYLEKYLAVFGGNRDLEQALRTYXNNLAVDYHNRFAAEWNKRNYSEAERILNEGLAEFPNDRHLLSDRETVNRQRR

SEQ ID NO: 108223 - protein, 120 aa, Unknown
  Obtained from environmental sample
  misc_feature (1)..(120): Xaa is any amino acid
MDSYLEMLPLSGIAKYSGNQPKDTLPFAGYPRQHPSEKNKLLLVYDPLGLAPTLMEFKLEDILFVEDIPSAVTEEGEGVPLVKLWVRRGAHGVILEPFEVNNPIQFANKSREIRERFLGA

SEQ ID NO: 108224 - protein, 168 aa, Unknown
  Obtained from environmental sample
  misc_feature (1)..(168): Xaa is any amino acid
MGDVGDDLFGLMRLLDNRLNALLGFLEYFYAPAHLRDRFLYHFRCVLRGFGGAHRKTAHLIGNHGKSGANLARARGLDRRVQRKQVRLKSYLINGLDYLEGFAARLLYLLIRLHGALHRFIGIIDHQRRAFGKRIRFDRVIGIVFDHRRDLFKRRGNLFHGGGLRACA

SEQ ID NO: 108225 - protein, 121 aa, Unknown
  Obtained from environmental sample
  misc_feature (1)..(121): Xaa is any amino acid
MGHIKPGKGGSPGGYPDTVSGKQFFCHRPRGDTAQGFPAGTSAAAPVVAYAVFGIPAKIRMTGTVYIPQIVIIRRMTVGVAYHYRNGRTQSFAFKHSGQNFRLIFLFPCGRRPALSRTSPP

SEQ ID NO: 108226 - protein, 136 aa, Unknown
  Obtained from environmental sample
  misc_feature (1)..(136): Xaa is any amino acid
MLTLKAPAAIKRMWSVLTGPHFVLTVAPSTMGRMSRCTPSRETSGPPPLSPFTAILSISSIKMIPVSSTLWRASSLTRSRSTSFSASSASSISLALATVTTFFFLPPPKKPAIPERLFSSSSMPAPIISTIGNCGF

SEQ ID NO: 108227 - protein, 118 aa, Unknown
  Obtained from environmental sample
  SIGNAL (1)...(22)
  misc_feature (1)..(118): Xaa is any amino acid
MNMVKTAAVAAARLVVTKILLADTTSSWLVMATVEPPLKPNQQNQRMKTPSAPRVRLCPGIARDSPFSEYLPIRGPTILAPTSDAMPPTMCTAVEPAKSWKPSWASQPSPQIQWPETG

SEQ ID NO: 108228 - protein, 269 aa, Unknown
  Obtained from environmental sample
  misc_feature (1)..(269): Xaa is any amino acid
MSGIPRLRKSCPDCNIAVSVSFDGFGKTHDTQRGVNSFYITSAALKKINDAFKDDGHIITNIATVVTKYNVNEILDFVTWVYGRFNVSTHTIEAARGVTREEGVKVVTEKSMREMQEKIAPYYMNYAQRIGSGMNFIGRGLTKFFYVGLMQAWSNIRMKNLEKPTCWNMDCTAGETSLVIDYDGRFRACEIREPVGNVKDYNCDVQAIMSGEAMKKEIEAIGHGYTANCWCTHGCWIMSSMNFNPGKMISMLIKAYKETKRLSKRTLLR

SEQ ID NO: 108229 - protein, 170 aa, Unknown
  Obtained from environmental sample
  misc_feature (1)..(170): Xaa is any amino acid
MIPGGDSIFHLLPLSRDFLHKAAFCYGIQNHHAGGSGDGVSAESRAVIASLKHVRRLLSGKERPGRDPSGKAFREGYNVGLYTIAFAGKEIAGPAYARLHLVEHEEDIPLLAELYGGGDVFRSLWNNAAFALNRLKQKAGGCLRVQGFFQRVDVPALHVHKALRKGPKCL

SEQ ID NO: 108230 - protein, 252 aa, Unknown
  Obtained from environmental sample
  misc_feature (1)..(252): Xaa is any amino acid
MRQLPVLYACYRSRGAELVPVGVPVARHVFGIARDGHVADARAAASCGGGVEVVVEVQEGLAGDPGGNAGLLDLPDWVVDGGRGGDGVRALGQVLLEGEQGVVGLAALDVEGVGQAHAEGGRGLGGRGAAVYLHARGPVNVLLVVGAIVGVVVDGQDRRLEVEAEVGDLVGLGDAGGVEPAEAAWVVGGGEGFGRCRRLGDVVEGALAQAGHGDLHDALGDDAGGADAVHQAVVVKVAALAPGLGGLPSLVG

SEQ ID NO: 108231 - protein, 135 aa, Unknown
  Obtained from environmental sample
  misc_feature (1)..(135): Xaa is any amino acid
MPAYGLLGLDTFKIYIMGWANREKKGGPNRTALRISIINKKRKQPDYSDSALLIASAAIFLSGRTTVAAPNLKASPGMPHTTLEASSCTIVYAPASFMASSPLGSSLPMPVRIMPTAFAPAYWATELKSTSTAGR

SEQ ID NO: 108232 - protein, 206 aa, Unknown
  Obtained from environmental sample
  misc_feature (1)..(206): Xaa is any amino acid
MGNRSSGVRERRKVFRREFARRPDQTPRAARMEERRGGLRRSLRHPHSRLPQRGREHVAPLVGPGQRGVLARLPEPQRLRQGLRGEVAVGTHNQGALPRRGCPPSPRPQNPPAVLFGERGHPRYHSPPQAKRQQHRRLGRQDRHPPKRQPLRAGHPGDDAFACRPRGDGLERGLEDDAEHLLVLEPRRAARTRRDLAGLQDHAAFA

SEQ ID NO: 108233 - protein, 126 aa, Unknown
  Obtained from environmental sample
  DOMAIN (13)...(59): S4 domain
  misc_feature (1)..(126): Xaa is any amino acid
MIELTAGKDDTGRRLDRILRKALPDLSLSLIHRLLRQKKILVDNKPATPNHRIEQGMIIQINASVTYSDKQVNNNIVNHYNFTVNKKNIDLQTLVPSPKSPVPILWQGSGIIVLNKPQGLSTHGAA

SEQ ID NO: 108234 - protein, 116 aa, Unknown
  Obtained from environmental sample
  SIGNAL (1)...(56)
  misc_feature (1)..(116): Xaa is any amino acid
MMSMPSASSPTATETPPAPKSLHRFIRRLTSGLRKRRWSFRSSTAFPFCTSAPALSTDSPVCTLEEPVAPAIPSLPVLPPTRITRSPATGSSRRTQASGTAPITAPSSIRLARKPE

SEQ ID NO: 108235 - protein, 185 aa, Unknown
  Obtained from environmental sample
  misc_feature (1)..(185): Xaa is any amino acid
MLPLNEPPVADQVTALSEMPVTVAVNAAVFPTNMPVGPVMEMVPVALTVTAQVAVFEPSCVVTVIVAVPGATALTRPFATVATAVLLLDHATVLLVASLGATVAVSCSCPPTPSASDVLLSVTPVTGTVEAVTVTWQVAVQPPSSVVTVIVAEPTPTAVTVGPLTVATAALLVEKVTPXVLAVAG

SEQ ID NO: 108236 - protein, 312 aa, Unknown
  Obtained from environmental sample
  misc_feature (1)..(312): Xaa is any amino acid
MTESGTLVARFFRLVCSFSQKIFKILILTFSKQSQRFNHPIIRINTRPARSQIPPCNVSICSRQKNQRLQRPQILLPPAAHFNSRPRHSQPIQRHYLQKLKRRLLRRLRPRAFYSVQKVYRHGVNPQPAQLQTQRDPILPALANAEDTPAAHPKPSRLCPTDGGHPIVITVRGHYLAEIIAARLQVVVVAHDPRIAQRRKIAIAEYAQRRVFLPIATALRKRPAQCLKFRFVKTPAARHRAKRQPPRPSLPAPCDNLPWFAKPVRRDIGIIVSRLRAKGAVLAAPARLDAHNRARVDRVAKKMPPCLIGGGK

SEQ ID NO: 108237 - protein, 157 aa, Unknown
  Obtained from environmental sample
  misc_feature (1)..(157): Xaa is any amino acid
MAGVAERRRRYSHVNLRGPGVSEAADDLLARRAAHYGVVHENDPFPFHVSRQGVQLLPHGAVALYLRGVDETAPYVPVLDKTVGERYAACRAVAVGRHQAAVRHAADHVGVHRILLSQNRAHVVAGLVYREPVEHRVGAGEVDVFEYAEPASLFLVA

SEQ ID NO: 108238 - protein, 145 aa, Unknown
  Obtained from environmental sample
  misc_feature (1)..(145): Xaa is any amino acid
MHRLAVLDQDVIGDIDHVVDGPQSGERQTPLHPIRRRPYGHVPHQPPHVTRAALPIFHIHRYSLRYRVAALRLQPPDRLSERQAETGAHLPRHAYDAKAVASVRGDLYLDHGVVGDVLGKRRAYSVVVRQSHDSGVVVRQPQFLA

SEQ ID NO: 108239 - protein, 232 aa, Unknown
  Obtained from environmental sample
  misc_feature (1)..(232): Xaa is any amino acid
MSALPSNLTPLVSLPLRTSRQGMMRLLSMSVLRAIGIKVFQHPQAGPAAFFRMKLAGPQPVASVNGAEFPAIDRGGDGQVSRAFHIIAVDEVKLGVRRHIPQKRAGTLGEQAVPAHVRNADGQAALIAQRGIKTAASAGNQTERTGNIVFIAGIQKNLAAQADAEQGLAGGHGLAQRKVQAGFPQVTHGLARSAHTGENKALGFAQYRRIRRDDAGDAQRVQRAAHTGLVPA

SEQ ID NO: 108240 - protein, 111 aa, Unknown
  Obtained from environmental sample
  SIGNAL (1)...(20)
  misc_feature (1)..(111): Xaa is any amino acid
MTEWPSSAAAAFMKASASQAEQSTAILSWDSEIASSVPSRPAYFFGTASRLISRPLASSPTATETPPAPKSLQRLIKRLTSALRKRRWSFRSSTAFPFCTSAPALSTDAPV

SEQ ID NO: 108241 - protein, 235 aa, Unknown
  Obtained from environmental sample
  misc_feature (1)..(235): Xaa is any amino acid
MHFLALQAKAHPGGGDHVFLDHQGAEVVGPEKKRELCGLRPHSHPGGLDVGDVVQHQPRNGKQAQIGGCRLRRTRDSGMRRLEGPGDEGGKALRPVLQLPQGEEVIQAVPVFFLMAEHHGRGGFEAEAVGFFHNAQPFRRTAFIGRYLPARLVRQNLRAAAGDGMQARLLEAENDLPRGTAFTLRPKHDFRRGKGMDVQRGPTRPHPAXEFRVPTQRQIRMVAALQQDLRTAELK

SEQ ID NO: 108242 - protein, 139 aa, Unknown
  Obtained from environmental sample
  misc_feature (1)..(139): Xaa is any amino acid
MPGTVQVRTELHPVLQNFAQRAQAEHLKAAAVGQDSFVPGHEGVQAAPPPHQLVPRTQIEMIGVGKDDPRADGFQIVRRDGLDRGPRAHGHEDRSRNLAVRRQQRRGTGRAVHGRNGEMSGPVHGAHCSLERRFWEVEL

SEQ ID NO: 108243 - protein, 108 aa, Unknown
  Obtained from environmental sample
  misc_feature (1)..(108): Xaa is any amino acid
MCRMAVNDAIKYIPEKYRTKKIWRIAISXRGFCFNELPASLMSEEICRLAIANYGKALKFVPDRFKSRELFFEAVRQDGRALNFVDVGMLSKEEYTEICRLALEGRRQ

SEQ ID NO: 108244 - protein, 152 aa, Unknown
  Obtained from environmental sample
  misc_feature (1)..(152): Xaa is any amino acid
MGETELLNPDTRIVTTTRPFSSGASICPSLMSGSPLKYSLTYFIDTSMAEYATWCQSAITEIMTFVAPPLWLPSSSGQSRAFLTASSIASSPPPSPVPISASLLPRRTASTSAKSTLMMPGRKMRSLIPRTPWIKTLSAAFHASIVFTFLSQ

SEQ ID NO: 108245 - protein, 230 aa, Unknown
  Obtained from environmental sample
  misc_feature (1)..(230): Xaa is any amino acid
MKGRDVGTGAGCTAVDVGLALTVTVQAAVLLPSTVETVIVAVPAATAVTVPDVTLATLVLLLVQVTFLFAALAGLIVAVRVSELPAARVVLVLLRDTPDTETTVGAGWTAVDAGTALTETVQAAVLLPSADETVMVAVPVATAVIVPPVTLATSGLLLVQVTFLFVALAGVMVAVRVSEAPATRPILVLLRDTPVTETVWGKGAGAGRGSKNAVPKNCEYTAGICCRLLA

SEQ ID NO: 108246 - protein, 319 aa, Unknown
  Obtained from environmental sample
  misc_feature (1)..(319): Xaa is any amino acid
MKHGGGKADRDDGHQDFGEDLEAGNQLFRREFQADGDQRRHDDDRDHVEEDHRQGEIDRLPVNDDPGNHSRQPAGYAADRDGDDAGQNAQGEKAAVGLINNAQAHRDGENNGRPHHGTENHAGVHPGSDVAPGHFLGQREPAHVKSQQGSREHGRVGAQSLIHGRDHSAQQARQHRRQGDDADHRQGQRAHGHKALFKLLAHAGYFLSQKTQADFAQHRLGAAELIKNPIQRGDKHKQHHDPKDNGIDIHGAVLLASTVFPVQRVVVYINICSLDTVRGLAAMQYSLSASSANTTKFSAVPATSASWRGSRHPDQRCTA

SEQ ID NO: 108247 - protein, 189 aa, Unknown
  Obtained from environmental sample
  misc_feature (1)..(189): Xaa is any amino acid
MSGTKTTDSLYKSALYALTRNEREVGVERLRKSIALGQKLVQGSWFNVCGDCRMPVTFGMHDLTQIMENLTRCTYALHQVETWHDRPGLALSQSRGLFEWKSIDQQKHILDLRKHISEQQAHIDELQKYISELHNSKSWRLTAPLRGFRNYFRALQNTVNGYSRRRAIALRIWLSLKKLRTKFIQETTA

SEQ ID NO: 108248 - protein, 108 aa, Unknown
  Obtained from environmental sample
  misc_feature (1)..(108): Xaa is any amino acid
MVFEIRQGYKSKDSKRQNGDIDNIAVAWSQGYLPVFAIFSGQIDSDLVLRYKNSRGGVIVGSLAGSAYESLFVFCKKILDYDLEGFFCRNTSFIKKEMYSTLEVLLNA

SEQ ID NO: 108249 - protein, 296 aa, Unknown
  Obtained from environmental sample
  misc_feature (1)..(296): Xaa is any amino acid
MRQLRGWIYYVLHTFSEEDLQYYPQTMKDIIALSKKKGLGVYVNPWGVGRVFGGEAYTELAARNPEMAQVSEDGKKLVAACPNSPAFRDYMKKWIEVVCSCDIETVFWDEPHFYFEKNNPALRACYCKHCSGTSRQASLISFLAFLTEEVHKLGKRNSVCLLPPWFPAGLENWNEVAELPFVDEVGSDPYWEKGDNLTKVQESYSEVSARIAELAKKYGKEAQMWIKNYHIEAGTEHFITEATQIASGAGIKNIFAWSYLGSKYMDFLRSENPETVWKTQIKAFSLERARSLGSRV

SEQ ID NO: 108250 - protein, 278 aa, Unknown
  Obtained from environmental sample
  misc_feature (1)..(278): Xaa is any amino acid
MGPLEYIRSFVDPDMSDRDRYVYIAAERYFAFPGYKEGVRLINQWYNEGLIYRDFAQMKRTTSDFANLLKTGRVGAFGGNWDYPYRTDYKILEDLRANVPGADFVPVDCFQSSDGIAHKDLMDKQGLRIFVPSNSKNPEAALKYLNWLCIRENYHFLQVGQQGVNHNIVNGVPSIIARPANDPWFQNSSQNIDFTMPMNGVEMGSPELNARVLAFSYPGIPPDVIVNAYHLATANAFTPVVVNVPTFQGGLYGTTLLAKGDVLLAQSITTSPADFDRT

SEQ ID NO: 108251 - protein, 262 aa, Unknown
  Obtained from environmental sample
  misc_feature (1)..(262): Xaa is any amino acid
MDYWSLFLIIKEGTIMAKIDEFINRAERLLNSGADSPEFKRWRNEVENYLKKLFGNESNELALFENIEFYNYYLTYDLLTGGWRKQILKEKDLFKRGIKNAIFHLKNFEEEIIEKEERAHYLDEFEDEEEIEAEAAEMAERAGRFDGIIDKGAKRRAGGAVSGGKAGKSGRNKNIFIVQGKNDGVKKQVANFLLKTVIKPIVLNVDERGIKMSSDTKDVYFEIDQEGKWQLDIAXKLXAMKLELKQKNLREILHNKNLLKYC

SEQ ID NO: 108252 - protein, 232 aa, Unknown
  Obtained from environmental sample
  misc_feature (1)..(232): Xaa is any amino acid
MIASAAIFLRGRTIVAAPNLKASPGMPHTTLEASSCTIVYAPASFMASRPLAPSLPMPVRIMPTAFAPAYWATELKSTSTAGRWWKTSGPSLSSTKYCAPDLLSTMCLLPGARSALPGITRSPFSASLTFISQVLLSLSAKDLVKYSGMCWTITVPGAPAGKETSTSFMASVPPVEAPMAMILLVVLVMARRLGGSVDKAALSFIMSARFFISTIAAAFIFCISISDMSPTL

SEQ ID NO: 108253 - protein, 178 aa, Unknown
  Obtained from environmental sample
  misc_feature (1)..(178): Xaa is any amino acid
MMAEVFGSFVTAAHGRGGHHILDIGVDTVYRHHEGRGAYSRGRGAVHPRRHAGQADGDRRRPQRGADKRGPGAVAALQDTARVRLLRGDGRRLQVRSRRRHSGHHHHGHQHHRRVHHRRGADGHGMGRRDFHLYPADHRRRPRFADAGAHDIRGFRHDRQPRRLRGQPRFRDHKPAAL

SEQ ID NO: 108254 - protein, 158 aa, Unknown
  Obtained from environmental sample
  misc_feature (1)..(158): Xaa is any amino acid
MESQTPPLAEPSLTCPPRPRRRPPSCTFSCRCRNRYAPASSSRWPLVRSRLSRYARSYACRPSFCRVRRPCLTRPFYPPRRATSAARPKRTHPNLRLRDRRDRHGCRDRHDLHGRRARRVRRRNRRDRRARLPLPRDRLRRDRHGPTRSAGTNPAPRP

SEQ ID NO: 108255 - protein, 140 aa, Unknown
  Obtained from environmental sample
  SIGNAL (1)...(74)
  misc_feature (1)..(140): Xaa is any amino acid
MSSSSSKASTNFIILTAAPASKLTGVSTTFVISAEVGSILAFTIASRTASKASTDAVISYSSPSADMSSAPASSASSMSLSSSTASLATVMMPVDLNILATELVWPRLPPYLVSRWRTSATVRLRLSVTASMRNATPPGP

SEQ ID NO: 108256 - protein, 219 aa, Unknown
  Obtained from environmental sample
  misc_feature (1)..(219): Xaa is any amino acid
MGVYFEICRDIGAENQDIRSGVDGKTGADYGGDLAKDSGFDLNAGADISGGGKIETSHDDIGEDLSDSGGDQIDSVLDNFQEDKWSDLSLEEQKQSMTDLAEYVAADTGNENPPEIIFRDDMNDGEYGGYNPETNTLEINENMLADSVEAADTVAHEMWHAHQQQCALDPTSEKGREYQEGFDNYISPEYDFEGYQNQMVESEARDYAQGFKDRLTGAV

SEQ ID NO: 108257 - protein, 115 aa, Unknown
  Obtained from environmental sample
  misc_feature (1)..(115): Xaa is any amino acid
MLILVIKNSQVQSKPPQFLHQYIKRFRYARRSGRLSFYNGLVNFGTPGHIIRLNCQKFLQGMRRAVGFQSPHFHFAQTLPAELGLTAQRLLGYQRIRTGGTGVHFIIDQMVKFRK

SEQ ID NO: 108258 - protein, 154 aa, Unknown
  Obtained from environmental sample
  misc_feature (1)..(154): Xaa is any amino acid
MKHKETAMRKFYRTIPHIVQAVRYDGGNKKQILEWCDGDGSVSRTDEAKIDIRTLNGVETASVGDYVVRDPYHNHYPCRSAVFESGFAPAEEVRKASVSREEFQAMLDRGRWVWEGDRGPAQDGPPVPARSSCSNENGGGGGRAMRGRVTSTTI

SEQ ID NO: 108259 - protein, 237 aa, Unknown
  Obtained from environmental sample
  misc_feature (1)..(237): Xaa is any amino acid
MSVKFRRYKLLADFDKVNKYLTDVFNIETLNGYLLPQYFEYAHTHPLFTFKLAHKFGLWEHEDELIGIACYDMYPGECFISVKSGFYSLLPEMISYSEEYLSEKSNGKTSLAISIIGKEIEKKELLEKSGYKKIHSETVSVFSYENPLPNQSLPEGFSVISLEDENDFKKINDCLWYGFDHGPEPDPDDDIDCRILMQSGPNFRKDLTTIIKAPNGEYACYAGMWIDRQNNYAYWNH

SEQ ID NO: 108260 - protein, 119 aa, Unknown
  Obtained from environmental sample
  misc_feature (1)..(119): Xaa is any amino acid
MGKHYRFNARPQQGDHPAAAFRYRRAAYTLHRVNQGRVIENYPFFAARGAVFIDQGNRQTDERFGKLPRVADGGGTEDKLRPRPVKSSDTAEAADDIGDMTAQNAAVGVGLVNDNELEL

SEQ ID NO: 108261 - protein, 187 aa, Unknown
  Obtained from environmental sample
  misc_feature (1)..(187): Xaa is any amino acid
MVPSSDAMLVEKTIIXRARLDIPGRGFLYKNNVHAPVVNLRVRHGKRIHAATMEQVIATLDELRGSSDWRRVGSINHEPADKSKTKSDSTRALFFIGEEEDVKTFRTMAMENGARGATLNQVEMRSYITQPQEQIMESHSRSLCDIITSRAVEEKIMEHITQSGLFENGKTCVLKTFDVELSSAIRR

SEQ ID NO: 108262 - protein, 153 aa, Unknown
  Obtained from environmental sample
  misc_feature (1)..(153): Xaa is any amino acid
MGVGRRVLDKCKLSVFKLCSSGGGDCKNLSILNCWLLEAVDIETGFITIPGNLYLALEVGDNKWQNGSKDIIEIDGKRWMPVEITVPGEGFNRAWKIGAGEWRRYGKEAALWGIREAWKLYPSVTVPASGDHPPEMPDAANIIRAMELELKKQ

SEQ ID NO: 108263 - protein, 194 aa, Unknown
  Obtained from environmental sample
  misc_feature (1)..(194): Xaa is any amino acid
MDNESGIYAMFGFLSLYDLTGEKKWLDALIGASDYTETWTYSWSFPVRVLWPNHPFTKNSISGQSPVTLGGGGGDMYMAACAYIYYRLYVITGDDHYRDYAEFIHNNTRQANDVDGGFGYALPGLSHEGGSFGTQTFMSHYHWLPWVTYVEIDPTSRLYDTFGAYDIAGADKLSPEERAVRNRIYDTYAKFIKE

SEQ ID NO: 108264 - protein, 128 aa, Unknown
  Obtained from environmental sample
  DOMAIN (28)...(119): Nucleotidyltransferase domain
  misc_feature (1)..(128): Xaa is any amino acid
MTNLSNNTSKVSQKKRKSYNIESISDKLDIIKEAILKCVPAKKIYLFGSYAYGKPNKKSDIDIYSVIPDDFDKNIINTMGEIASHLRNYNILNVDLFLVNENKFLFYTENSSFEETIYNEGIILYERS

SEQ ID NO: 108265 - protein, 122 aa, Unknown
  Obtained from environmental sample
  SIGNAL (1)...(31)
  misc_feature (1)..(122): Xaa is any amino acid
MKSVCKKIAIFLMLVFLACTPGFFLFGQYNADSLVVRIAVIGPGDELYFWWGHIGLIIEDSESEKARFYDWGIFSFENENFFPXLCPWEAPLFLWGDSSGMDFQALYQYKPGHHSLYPQSPG

SEQ ID NO: 108266 - protein, 128 aa, Unknown
  Obtained from environmental sample
  misc_feature (1)..(128): Xaa is any amino acid
MLRRCLLRRCFIRDNRKRRAVFYDIKFFIRFGIFDKQFHQKTVKFRFRQGISPLMFNRVFCRKNKKRIWQRITFFPDCYLFFFHCLEKGGLYFCRSAVDFVRKNYIREYRSAPNGKITVRLFPDQCSR

SEQ ID NO: 108267 - protein, 159 aa, Unknown
  Obtained from environmental sample
  misc_feature (1)..(159): Xaa is any amino acid
MYKLNVHAPVVNLRVRHGKRDHAATMEQVIAVLDEVRGSSDWRRVGSKSQEPVDKSKSKSDSTRALFFIGEEEDVKTFRQMAMENGARGATLCEVEMRSYIARTQEQIMESHSRSLCDIITSRAVEEKVLEHISESGLLESGKTCVLKTFDVEMSSARR

SEQ ID NO: 108268 - protein, 187 aa, Unknown
  Obtained from environmental sample
  misc_feature (1)..(187): Xaa is any amino acid
MANDLSYVLVTPYTIAKSRTGGVLSRLLSRTDLELVGAQMFTSDDAFAKEYAKNLRERSPQNQVMLLADYIEQNIAPSGGRPHRTLLLLFRGENPCDQLTATCGHLYTQHIEVDALSGETVRDTYADMIFSKDNPDAVSYFEPAVMTPRNQDEANESLLMMAKFLXNKGNIVQNLVYPDPSKLSRLW

SEQ ID NO: 108269 - protein, 108 aa, Unknown
  Obtained from environmental sample
  misc_feature (1)..(108): Xaa is any amino acid
MRTSTGERLGITTFAPAKIPRSLPRTSSVPRAVVAGRSKFGCIRRSIAKIFSVKCTSPALLSFKGVSEWGIKGPMPTICGCNSLMKSKSSTICSRVWFGVPTIKPHPT

SEQ ID NO: 108270 - protein, 124 aa, Unknown
  Obtained from environmental sample
  misc_feature (1)..(124): Xaa is any amino acid
MACTLMAFSARSRRLARVSRSARANSMLIVSMSDSGSTRSFTWKISGSSKQRTTWAITPTSRMWARNWFPSPSPFDAPFTRPATSTNSTVAGIVRSGLKISLSLVSLASGTSTMPTFGFRVENI

SEQ ID NO: 108271 - protein, 148 aa, Unknown
  Obtained from environmental sample
  misc_feature (1)..(148): Xaa is any amino acid
MIGEGLRARRRRQHGVARKSACRADLDHVEDALGQSSRLVKHYGVKTTYGFQTTAALHQNAPPRRLAYTGEKTHRYGQYKRARTGDNEENQSAVYPVHPNTVKKQRRRDGDQYRGGHNGGRVVPRESCNEVFSFGLFARRAFHESDDF

SEQ ID NO: 108272 - protein, 206 aa, Unknown
  Obtained from environmental sample
  misc_feature (1)..(206): Xaa is any amino acid
MIQFINAYTAFYSLVEHEQPLVGHSFEHIADFAVRLRGEARQVQARKADLGAAHRLKQGLLESVGYGHDLAGRLHLGAQFFMSVNELVKRPLGEFHRHVVERRLKGGESRAGDGVCYLVERVTESDLCGYLGYGVARRLARQRRRAGDAGVDLYHGVVEFVGVKRQLHVAAPLHAQRLDDVERRRPQHLVLLSASVTAGAMTXSRP

SEQ ID NO: 108273 - protein, 254 aa, Unknown
  Obtained from environmental sample
  misc_feature (1)..(254): Xaa is any amino acid
MVVVPSENFYVLPESQAARLPQNSRANISSTQDLTEYCTEPTFRLAYRFNNKGEKKGASGGNGGIDILGRGNNYEWLWTTYEQGGWFYDLNGIKREMINGFQKDPNNGVELTVKPEFVYENGIPYLQLRNILYNPGNNTVTGLRFGASADVMIHENDYAPLLHKPYGAYMTDWETNPSLELMFVCEGGGGINPVDTLWLGRYGEGTHLNYIYSNNRSDALNMDSAISFSYQNIALAPNQKKEFIVRFTLARTEK

SEQ ID NO: 108274 - protein, 279 aa, Unknown
  Obtained from environmental sample
  misc_feature (1)..(279): Xaa is any amino acid
MSNFILNLIHRPEMVPEYAEKVTGHGKKEDIGAKSLLTESLDIFKLQQSIAHKNGLKTTIQMTYASLFNAEAVQTAKDDNRKYGDEIALSLLGLPCNEFREKYKTKDFCIWMFSMEDKKAIVDDVFGKFYEIFGFYPASTGSYYMDAELINYIKEKYPQVICAIATCWEEGPKAYRTCNNSWYTLFDGGPWNPWIPSKQNTHAPAANENEDSGIVAIPHLSRDLLACFDGNGSNFGTHPQNVLRGMIYKDGKYPYLFNLIDQYRHLENTTKVRLTIWCL

SEQ ID NO: 108275 - protein, 99 aa, Unknown
  Obtained from environmental sample
  misc_feature (1)..(99): Xaa is any amino acid
MVYFALFNHIIDFLSFYLVITPCAATIATVKREYSSVKGLIFIILYQTAIAWLAAFCVYLIGGMVSLCFVTTNEFLFLPRTTRTNTKIFCTNFVVVRGS

SEQ ID NO: 108276 - protein, 199 aa, Unknown
  Obtained from environmental sample
  SIGNAL (1)...(21)
  misc_feature (1)..(199): Xaa is any amino acid
MKNLVLLSFILNLYNVFSLSAQDGFSFLDRIYFGGNFGFSAGSAYTDIEISPHVGYYITPRWSAGVGITYEYYNNAYYWFYPSSGQFKRLETHIWGGRLFTNYVIVNNVNDWIPLGLNFRIFAHLEDEMMWYEKKMFEDNAKGRMTXNSILVGGGLRFPMGKRSSMNLTVLWNLNSNLSNIYGGGPIIRIGYNFSSFTK

SEQ ID NO: 108277 - protein, 130 aa, Unknown
  Obtained from environmental sample
  SIGNAL (1)...(30)
  misc_feature (1)..(130): Xaa is any amino acid
MLPVCLEAASSSCSLCCSSIALRMFSSCSATVLTPVSIDSNLVVTVSVDLVILSIDSFIFFKTLPIVFDCSLDDSASLRISSATTAKPFPASPAWAASIAAFIESRLVWLAMFSITELISSKPSDSLAIS

SEQ ID NO: 108278 - protein, 112 aa, Unknown
  Obtained from environmental sample
  misc_feature (1)..(112): Xaa is any amino acid
MNPYCPEFPCHPGGGGGGYAPGPPGGGVVGGGGGGYEPGPGGDGGLAPGPVNPCAETVTAAMSDTKQQTKKSVYFLIVYLQLAAALYSNEAASIIGGSATRRLNLLKWIYVF

SEQ ID NO: 108279 - protein, 220 aa, Unknown
  Obtained from environmental sample
  misc_feature (1)..(220): Xaa is any amino acid
MVEYCYNTGNVTSTAGNTVGGIVGNNAAGSTVQNCVSLGARVTAPNYTGRIAGNSSGTLGNNYARSDIKIGASGAEAAVSPAGANTPNGGNISITSGASLTVVFSGWDTALWNISGTFAIDGNLATLKTNTQSPAPTLPAAYSPLGTADNPFLVTNEAELRKVGTGTDGWTLSAHYKQTQDITMTGGNFPVIGTTATKFTGSDDGGRKTITGFSPKLHKQ

SEQ ID NO: 108280 - protein, 253 aa, Unknown
  Obtained from environmental sample
  misc_feature (1)..(253): Xaa is any amino acid
MHVQDSLLPVARHAGYGRRHAAPARPGSRPGRAAASRSFRRTGTLGPDAPGPETCDRLQPVPAHGASSAARPEKTGRGQPEQTRAGAHDREHCVCRLPEAGLAGRHGACRRTSPKCGYAAQADDRSRRGRAAPDRLRPCPAFCAGGIAGQTGVRGGEPRAAHNPRPGVAGHGADRRSGRCALAVDRGRAGAAGKPHRLNSLRRXREFQFFATRVRTDNATLHRGGAWHRTACAMQNGLRSRAWRRALPGASGV

SEQ ID NO: 108281 - protein, 111 aa, Unknown
  Obtained from environmental sample
  misc_feature (1)..(111): Xaa is any amino acid
MAETRAQARLDLVLAGGADGPQSPAVKGALGGDETVTARTVTVKGVFTGQLQGRLVGLGPGVAEKDPLQAGTLGQHGRQPGHGLVVKIVGDVDEPVGLAGQNPGHGGGGVA

SEQ ID NO: 108282 - protein, 144 aa, Unknown
  Obtained from environmental sample
  misc_feature (1)..(144): Xaa is any amino acid
MAWQSRCHFSAWNIALVYQGFDFVQHPFVKRAVVFKFQGAYTVSYILYPVAYGMGIIVHGINNPLVAGAVMACFFNAVNCRVAHIHIRACHIYFGAQKGIALFQFASFHFAENLQTFVYGSVSPGAWLPRACESASVFANIIAF

SEQ ID NO: 108283 - protein, 143 aa, Unknown
  Obtained from environmental sample
  misc_feature (1)..(143): Xaa is any amino acid
MNKELSKFSELRAGAGGFDPEKLREAARIAIEVSLKVQAGEQVLIISNPRSEVVSIAEALYDASIGAGGRPVLMYQPVKTQLSFAEPAVIAAFNAKPQVVISLSDEKLGKDPTGIAKPYQHNGTGYDHIFHLLMYGEKNCRSF

SEQ ID NO: 108284 - protein, 105 aa, Unknown
  Obtained from environmental sample
  misc_feature (1)..(105): Xaa is any amino acid
MEEFIQMNIANARHPAPFAPFIGALEDLQPKIKYRLVLANILLETIQELLPQMIQRLGPSGHLIASGILAERQDEALLLLAVHGFRPIKVAAEGEWVAILAQMDS

SEQ ID NO: 108285 - protein, 99 aa, Unknown
  Obtained from environmental sample
  misc_feature (1)..(99): Xaa is any amino acid
MFDIREMKAGGRFVKYIQRAACRTPGKLQGEFNALRLATRKGKRGLAKLDITKPHRKQGLHLACDLGDGERKIPPLPQWSCPALRLYSCLYTVFQESRG

SEQ ID NO: 108286 - protein, 135 aa, Unknown
  Obtained from environmental sample
  misc_feature (1)..(135): Xaa is any amino acid
MSFFRAHLSIVESPATCAPDETMAICLPFFIRAAVCSANSARNAELIFPLLPASVFEPILIIIFRESAISLVIILTPYLSAAVYKIFYRRKGFKTHRSPCVKFLSADSQFRAEAELPAVRKARGRVDINARRVHL

SEQ ID NO: 108287 - protein, 306 aa, Unknown
  Obtained from environmental sample
  misc_feature (1)..(306): Xaa is any amino acid
MAQVKAGKLYLPRGENLSLADKPFVQGPVYLVFKRAEGMGNALFRVGQRVLEIVHGIDAPTVAGAVMGLAAYAVHDGIAHKQVRVGHVDFCPQGSCPVGEFACSHTGEKVKVFFNRTVAVGAVFARRRFGYVIFILNSGSAVFAHFNIGKIVNIGFSLFDNLHRQIVQVLVIVRRVIFPVLPVITHPFNIALDRLDIGYIFFLGIGVVKAQIAFAAKTLRHAKVDVERLTVADMQPAVGLGRKARMHMVEFSRRQIFFYKFADKIRSQNIRFRAGIIFVNHNFPFKNLSDNTGQGVKLPTMFYHPC

SEQ ID NO: 108288 - protein, 103 aa, Unknown
  Obtained from environmental sample
  misc_feature (1)..(103): Xaa is any amino acid
MSISSADPGLPSDFVIDELIHMLVSAKKFTVVERERLDLIRAEINFQYSGDVDDNSAADLGKQLGASTVITGSIGGSGALRRFRTRVLDVQTAAILFTTAESF

SEQ ID NO: 108289 - protein, 189 aa, Unknown
  Obtained from environmental sample
  misc_feature (1)..(189): Xaa is any amino acid
MFEKPHPFRLYAQILIFSALVACGALILWPLQQTLFGGMVSIRDNLINRLERQIGRKIRYSSISPSLFGSFDVRNISIMGRDDIPLLTMSRFRVAYSLLDIIRGRTLAIRSVQIDSPLINYNTATDSDLLELFRAVRSGQPSRELSGMLPEKIIVRIRNGKCQVFSGNNNFALDAIDFNGAIFEKRRRP

SEQ ID NO: 108290 - protein, 118 aa, Unknown
  Obtained from environmental sample
  misc_feature (1)..(118): Xaa is any amino acid
MTRLLDDLIGLPYKVHGRDESGLDCFGLIWLIAKRIGTPLKDPVYKGFDPSLVKLADYIGFKKINKFETGCVLEIEKDGRLHLGYAIDDERMVHATHNEGVIVENIVNYNVKGYYKFS

SEQ ID NO: 108291 - protein, 192 aa, Unknown
  Obtained from environmental sample
  misc_feature (1)..(192): Xaa is any amino acid
MPNLIKDIKNTMVKKGISDEIFTQFDFSENDYNQPERILTLINQMDKLLSKEQCLSIMEEQGCCTTGKPAKAHSDFGKKYAGKTVKERLELFDKLETVHKPLCKLNEDGTLSAFWGTGNEGDYKCVCGFMRKLSQPINVSKTFCGCCGGHVRKNLQRSLGVKLQLKKIVSSAISSKGKKHCEFKFEILNKMK

SEQ ID NO: 108292 - protein, 217 aa, Unknown
  Obtained from environmental sample
  misc_feature (1)..(217): Xaa is any amino acid
MFSALHRQKSVRGDSRRFLAVVVVHLELALLSRKLLLNRTDDNALLRGRFAQPSAGVGIVGEAFRQDVLCAAERLXRRVDPLFGVDELGGPCRDVAALGGEGEQPVGQGFEPRLLGLGGPGGAFRLVGQVEILKSGFRERPVDLAFQVGRELALFADAIKDSLPALVELLVVFVPVQELPYLQFVERPGALFAVAGDERDGRPLVEEGQDVFDLGLV

SEQ ID NO: 108293 - protein, 221 aa, Unknown
  Obtained from environmental sample
  SIGNAL (1)...(28)
  misc_feature (1)..(221): Xaa is any amino acid
MAYKHFFNQTFTFLALVLIITLSLSACSSPTDQVLTTDPLTETYTTVKGTKTYELTITQSAANANAKSAARAAFIPAAGDTYVLKIAENGVTQISSGTVKAYSNNKFTLVSSINVTVSFEVTISGNSINNITGTITVETGITIIGPGTITPVTGFVAVTGITGVPTSGTVGTLTHMRYYRQHEPLLTPHRPLLFRCALLHRGEKRPLFTKVSQSAAINNFP

SEQ ID NO: 108294 - protein, 205 aa, Unknown
  Obtained from environmental sample
  misc_feature (1)..(205): Xaa is any amino acid
MRHPHQQRVAGVARQPAGGFHALSGRTRGGRRQLVLQREPAQRLRRRRIRPLDTRFQRDRRQLPPRHPRHGAQNRRQGRPADRHAEPDGVGGVLSGGDQRCAPHSVMRQAVHRYGRGVRLHNPGSRRRDSYPRRAVPPLLPAGYKNGRYRRVRRRFRRRGAGGAKTPVRVRGDVQDGGSVRVVEKPARRPRHRHFGRGLAVDGKR

SEQ ID NO: 108295 - protein, 133 aa, Unknown
  Obtained from environmental sample
  misc_feature (1)..(133): Xaa is any amino acid
MLVKETGKITENVYLTGIPAFPIILVDIERPVLFEGGVSCVANKYIEDIRAILAGRSPEMIFLTHAHWDHCGAVAAIKRAFPSLKVAASQQSADILKKKSAIDMITKLNADEIAAIAQENGPELLTDDPFESF

SEQ ID NO: 108296 - protein, 195 aa, Unknown
  Obtained from environmental sample
  misc_feature (1)..(195): Xaa is any amino acid
MVGVVMLAVAVRVSPTFGAALLLSDSVPAVPPVVMIVTVAVPLTVPVTVEVAVIVKVPVAEPVAVNKPVEEFIEMPVPPLPPQFTVAAGFPVPTTVAVNCCVFVVGVVPRSITTTAGETVTEVTVGPLTFCSNPLTVTETSVAGFAIVTVAFVWSLPSFTALVQVRPLDEIWCVLLTANVNVTTSPAAKEAVPFV

SEQ ID NO: 108297 - protein, 188 aa, Unknown
  Obtained from environmental sample
  misc_feature (1)..(188): Xaa is any amino acid
MFHSFTVLSPEPESACLPSGLNATEKTLFLCPEKVLNSRPLAASHSFTVLSQEPESACLPSGLNATEVTRSVCPKKVLSSRPLAASHSFTVLSQEPESACLPSGLNATEVTHSVCPEKVLSSRPLAASHSFTVLSSEPXSTCLPSGLNATELTASVCPEKVLISRPLAVSHSFTVLSKNRKESVFRQG

SEQ ID NO: 108298 - protein, 182 aa, Unknown
  Obtained from environmental sample
  misc_feature (1)..(182): Xaa is any amino acid
MLGPQFKAPGLEQAAQGQGHGGVVKLVGAGQNQGQAVPGLAVKGEAEKGAAGFVAAGRRGFEIPAQGQPGAVFFGRGPGDDRFGLGVQPACDQGAAGFDDPGLFGGYGGNGVAQVFGVFQGDVGDGRGQGFDDVGGIQPAAQPGFNDGRLHALFLEIQESHGGDEFKEGRRRFRVHLGPDAA

SEQ ID NO: 108299 - protein, 109 aa, Unknown
  Obtained from environmental sample
  misc_feature (1)..(109): Xaa is any amino acid
MLCPLKPLNVNYCSLYTVRHFKGCVAHFLSLLAENEIQKLKFGSGLGFAFGRNLADQNVAVTDLRADADYALAVQVIQALFGYIGNVLGYLFLPQLGFPHLHNKFFYMD

SEQ ID NO: 108300 - protein, 336 aa, Unknown
  Obtained from environmental sample
  SIGNAL (1)...(20)
  misc_feature (1)..(336): Xaa is any amino acid
MRSLFLIILFAFFAPIKSYATQQKPDNIIYKGNLYKLTQNNPLEPYLKKDKDKWEWLRKSPSTNLWRGYFATFEVVDNKLVLKEIENSSKASILEKFLSVAGIKGPFKLDYYTGTLMLPGGKLLYSGRFFKIYEYHLLLEFKNGILIKESRMNYMEYLAYEKGQATRLQELLYKNDYPSALEKLEYYKAMEKGELSAELKTKYKKRFGEQISNFELEIERVSFTYKISFPTVYYDITVTKTAKGARAKYRYNYHYAEDKVEVELSMEEWLDFVRALYKCRTDKWEKKYGKWIEHGKGWDFDVYSFGKDKSDYYSGENAYPPNWSEFKKIMDDMETE

SEQ ID NO: 108301 - protein, 131 aa, Unknown
  Obtained from environmental sample
  misc_feature (1)..(131): Xaa is any amino acid
MEKVGDVAIMRFYENVEEVNEVDENGGSAHIGYKVDRYTIVRPYDDDLVSRVLRDANAWREMAKGEERGRLAAEARAKRDRLLESSDKKMHIDSPLSSGQLEEHKAYRRALRSIPEQPGFPYDIDWPVEPS

SEQ ID NO: 108302 - protein, 217 aa, Unknown
  Obtained from environmental sample
  SIGNAL (1)...(29)
  misc_feature (1)..(217): Xaa is any amino acid
MVITVRRIAWVLTILFLLFAFASCGGRGARGRNVVIYENDGSTEDIVLENEFLQLRFLPPTAEIILTDKASGAQWRSNPQDAANDPLADVITKDFMGSQFALEYADAAGVGMTLYSGVNSVALGMYGYELVDNALEVRYSIGDIARAFIIPPVAPESRMLTFLEKMEEDDRYKVEASYRLYDINNLRSSDDKGALLASYPDLSRTKLYVLRDNAQEY

SEQ ID NO: 108303 - protein, 246 aa, Unknown
  Obtained from environmental sample
  misc_feature (1)..(246): Xaa is any amino acid
MLSFALIAVNKGNGFPPVPLAAEYPVAEFVVHRRFSQFAFFKPLGDLVLSLACRQPADKAGVYGVAIGDGTFSRFSRIIFPAFGLFARDNLPYRQIKNLRKFPVALIVRRNRHDGPSAIGDQNVVSDPNRNFFIVNRINGICPGKNACLFLCQIRAFKIAFPCRFFKVRGNSGLLFRRGDFFYKMMFRGEYHVGNPKKRIRAGGENFQGFRMAFYLKSYVCSFRTANPVPLHLLHRLWPIQAVKVF

SEQ ID NO: 108304 - protein, 118 aa, Unknown
  Obtained from environmental sample
  SIGNAL (1)...(22)
  misc_feature (1)..(118): Xaa is any amino acid
MNMVKTAAVAAARFVVTKMLLADTTFSPVMETVEPPLKPNQQNQRMKTPSAPSVRLWPGIARDSPVLGSYLPRRGPTIAAPTSDAMPPTMCTAVEPAKSWKPRSASQPPPQIQWPEIG

SEQ ID NO: 108305 - protein, 362 aa, Unknown
  Obtained from environmental sample
  misc_feature (1)..(362): Xaa is any amino acid
MRHHLRRAAHPHEPAPVGVLEPRVDPLHRGALPVAGPLRRVKPACAAVAPVRLYYRDLAHGADVPPDRLRVVCRVGQDVQDRRPFRAHLHERYGGLRVVRGRGRERRAHRHAAVRHGEVQXVARPRRHVPPAVALGAPVAAPGQVSEALLRRPRGLHFQALRGLVFALSLSFALRRPLPRLDCGRVHAHVPDHAAPHGGLHHRPVDAPGEPVGCERGERPRERDLRRRVLRPPPAAQGPDGPGRPEEVQQGPRRRQVPHRLGDERRRDGLPVVRPAPVAPPHVALHEPLDPRELGGADELGLLLAEGVERPLYVGDQPLPYTVPEAEGRLHDRSFLFGSSNPKEWCALRPLCSIPRPLPWGF

SEQ ID NO: 108306 - protein, 199 aa, Unknown
  Obtained from environmental sample
  misc_feature (1)..(199): Xaa is any amino acid
MIHLEEVVLPQVVYHHEKNAAFEAPHGLRAEALLFLRIALLDKLPQLVEQFLLVHRLRFDLFRAVQYAERRLRLVAQSVHIPCLFRVNAFGGVLHNHVFHGVGYLVEYLVLQILAAQNALAQAVYLAALEVHHVVVLFQMLADVEVAALHALLGAGYRVGDPRVADGLALGRAELVHHHPDPLGAEYSHQVVVYRQEEL

SEQ ID NO: 108307 - protein, 139 aa, Unknown
  Obtained from environmental sample
  misc_feature (1)..(139): Xaa is any amino acid
MAELPDPQVRRRTRRHRDDYAVGILGAAPRKPHXRPRVLKLGRRRVLASLAQRDERVDIPAPAQNGRQNGRLRQRVPPRRLRARTKGAEPNGERTAPSAIKRLGVHHENGDDGRVRDTQGERTHSELFEAVRPSERTQY

SEQ ID NO: 108308 - protein, 211 aa, Unknown
  Obtained from environmental sample
  misc_feature (1)..(211): Xaa is any amino acid
MASKINREESDTLPQEYYEGVYTSKTDIFYLGELLNRLLRTELNTFPIQDTNFSYYNILDKMMKKNPKDRYSKFSDIKEAIDKYDFINMEIAPTDKLIYQAFTDSLRNAINHFIDERKFNYDIDQFISQLEKVIKDNCFEDKIQNIKEVIRSVVSGGYNYTPSYYISCNDVKTFYEWFKKSSLQSQQLILNNVISKLSGIKIVISEPDIPF

SEQ ID NO: 108309 - protein, 143 aa, Unknown
  Obtained from environmental sample
  misc_feature (1)..(143): Xaa is any amino acid
MVSPSDHGLKPRPPSGTAVREKTSCQITWLNRLQSPLLDFYSAAGRGNRVLDLCGFFLGNIFLEGLGRAFNKVFGFFKAKAGDRPDFLDNRDFLGFLESLKNDGKLGFFLSRRRGSRPAVANRYRHRGRRGHAEFLFHHFYQF

SEQ ID NO: 108310 - protein, 214 aa, Unknown
  Obtained from environmental sample
  misc_feature (1)..(214): Xaa is any amino acid
MLDFDELRQKLNNADSQMKKNIGHLGTMAKDAERVSLVAKNAHIIITDIDRKFEQATKLTKIDISFLFLAIALQVARQYFFTNFKERLDHNDAAKDAKEKEEKKFGKETKDEKAERMNAKHKWYHPSIEEVTFNPVPFDQTTGLEGIGGAFEHRAXTPGHDAILGYIFGTANIANSTLTVWTRQSFHVKYGNVGTQRXPMVTIMLKLXKYLIIL

SEQ ID NO: 108311 - protein, 192 aa, Unknown
  Obtained from environmental sample
  misc_feature (1)..(192): Xaa is any amino acid
MGVYEFVKGPFREFYRNIVYRGLKRREGVARNGVDNFVQGVADGDLSRDFRDWVACRFARQRRRARNARVYFDDRVFKAVGVQGKLDVAAAFYAKGADNIQSGKAEHLVLFVRQRDGGRDNDAIAGVYAYRIKVFHGADSYHVPVAVAHNFVFNFLPSGDRSLYQNLAYRRNGQAVCCDFTKGVFIRRDAAA

SEQ ID NO: 108312 - protein, 278 aa, Unknown
  Obtained from environmental sample
  misc_feature (1)..(278): Xaa is any amino acid
MCAVVTAISQKRGVYESEGVXSVFGRTLPSKKTVYYYQCYDAKGKRQWAKSTGLTKKTEAMAYCMKLFKDGVLIPEQRVPLFSEFSNGWWDLDTCRYLKWRQLRDPIQEGTLSMHKRNFAHHIKDYFAKYRLDEITPNVIEAWLLGLSGKGLKPNSVNTLYRTFKLMMGEAYRLKIIKENPCKEVKDLSVDEPKRIIFTVDEVRKLFPADWNSIWDSRIDYLANMLAACTGIRISELRGLSGCHIFDDYISICGQFIDQRYVPHTKTKEDRNVLYLCR

SEQ ID NO: 108313 - protein, 238 aa, Unknown
  Obtained from environmental sample
  misc_feature (1)..(238): Xaa is any amino acid
MARHFAQSYRRPKHNRRLPRPPCQRLQLSGLERRQLLHQPQRPRQTRRRANLRQRQRIRIRLRIGNSRKSAVHGSRSRARQFRPQSQNRYFFPRRSPVHALCHQPPPGRKGRARPALHDRRVGKEILRRKPRVHARPQRQIQRTRARQTPGRGKTLALPAPLPAGNVYKSIQQRSHERPRPQGTRKGLGTGLRPHEGRDMEVPHLRRGVLRRPRNAQPLPLMQQTPRLSLLYKNIQRL

SEQ ID NO: 108314 - protein, 99 aa, Unknown
  Obtained from environmental sample
  misc_feature (1)..(99): Xaa is any amino acid
MDFSGNDEFRQGVFQFRLYCPLEGPRPIHGIIAPFGEEFFCRSRGVKCNFTFGQPLRQAGKLNFNDFADFVLAEPVEDHRLVDAVEEFRPEIPLEQFQK

SEQ ID NO: 108315 - protein, 245 aa, Unknown
  Obtained from environmental sample
  misc_feature (1)..(245): Xaa is any amino acid
MSNRWFASSEWQAAHINCMAFCVQCGNQLEENQNYCSTCGAAAGGAASRQAVPAQSGKDGGLLTCPSCGAAAGPLDLKCPSCSREFRNRPAAKSVNDFFEQYRNAGPSERAAVIKAFPVPNVREDILTFLAMGIGNTKGLTAMEEAEYRNRDGIRSILAGGSGATALTYQKQEIAAWRAKVRQVLDIGKLLIKDNESQALFQRYEQQLKKELGKRAFTILKICIGFAIGVVLIALMMLFLPKGGG

SEQ ID NO: 108316 - protein, 343 aa, Unknown
  Obtained from environmental sample
  misc_feature (1)..(343): Xaa is any amino acid
MGCSGVVFADTEVAIHVHPPRPEAVVVLDGERVGITSRQRFPVAARAHAGWCRVGIVVHGAEAELTTAVVSPRPEAAVRLEGERVFTASRHCSPVAGRAHAGGGIFPFVCRRAEAELAEVVVSPRPEAAVGSEGKCVGPINRHRLPVVGRADAGGDGSIGGVTEAEPAVFVISPRPEAAVRLEGERMASASRNRCXIVGCTHADRSVAVFICAITELTKTIISPCPETAIRLDSERATSASRNSFPVIGCAHAYGGVAVCSCTIAELTKTIAPPSPETAVRLDGKAACKRMHIGRGHRYPVIGCTHADRNGLVCCGAVSELTMFVSPPGPKTAVRLDGKGVRK

SEQ ID NO: 108317 - protein, 141 aa, Unknown
  Obtained from environmental sample
  misc_feature (1)..(141): Xaa is any amino acid
MRRRGAGAHHRVVRPLEPVRHRDASGRHVGYHHRYQERGDAPRPSVQQLYVLGLHGVQPAHAGAHNDADPVQVLIRKVESGIVERHTRRGEPEKNSTIVAPDVLGVNVAGKVQIPHLPRDLRGEVGNVKRRNAVYARPPRA

SEQ ID NO: 108318 - protein, 102 aa, Unknown
  Obtained from environmental sample
  misc_feature (1)..(102): Xaa is any amino acid
MVEVQLHDLALGVAPLQLNGCEHLAYFADERLVGGEVQVARELLRYGGGALGLFAAGDVDEHRAEVARHVDPPVVVELAVFGGDDGILQLDGDLSRGTPRPI

SEQ ID NO: 108319 - protein, 219 aa, Unknown
  Obtained from environmental sample
  misc_feature (1)..(219): Xaa is any amino acid
MNPLEDVRKDILFLEEPFKYPEAFRIKDGDSVKVTYSYDGEVAKLKCRFIDEVHLTIGNNSYHISELAEKLKKNGNKVEPIPNQKPMLDVIAAKYGEPLQDVTIPMTEAAIKKLVGGKYEIELLYVNGQGINGRYGPYAHDAIVRGKDGIAVCGVGGDNNTFTSLHPYWAQSYKRQLSPAQRAELEAETLLGEIAAAKTQVAGRDTADRSALRKVAEAR

SEQ ID NO: 108320 - protein, 125 aa, Unknown
  Obtained from environmental sample
  misc_feature (1)..(125): Xaa is any amino acid
MLAVSQGVEKSVLGVLALNVEKSLTPELMQKLLLTLASGYAGKQATVSLSEEDSKKLASFITGEFQKKLGAGVTVQSDSGIFAGFRLSFDNGKVSQEWTKEAIAEALSAILRPALAKIVQQAVKG

SEQ ID NO: 108321 - protein, 178 aa, Unknown
  Obtained from environmental sample
  misc_feature (1)..(178): Xaa is any amino acid
MVNLLKDKKFNFISAANKKFIIEFTKEMDLFEYDFGGEIGNGFCWGNYMIIYSKKNVKSKKIIARIYIRDNGVIIWGGKENHFKNSIVLRLFFNDIDKHREYIENAPSFIKEPFISEHGYGVCNHCKKECRCRKVYSINGKQFEKCSGSVFEFHNPKTEYIKDYMNIIEEFYGKKSFK

SEQ ID NO: 108322 - protein, 168 aa, Unknown
  Obtained from environmental sample
  misc_feature (1)..(168): Xaa is any amino acid
MVQAVCGRRFALPHAGRPRFALARGKAGGLTRRYRGEHRLGRSRLLVDLKGGQDLLHDGELVACIVDGETRRVAYRLRFAAQYLGAEGVKRAYPKPADRRGDETLDTLAHFVRGLVGECGGEYLVRTVALVYEVGDFRGEHAGLAGPGAGENQLRPVDISHSGALNII

SEQ ID NO: 108323 - protein, 139 aa, Unknown
  Obtained from environmental sample
  misc_feature (1)..(139): Xaa is any amino acid
MIAGTPHGQYQEEQGKADHDLDQARNHHIRPSAKIARDAPEGDADDGGDAHRDDADGQGDLRAVDDAREDVIPQVVGSEDMALFAGGEQGFVQPDFRRMKGYGRHDDRVVFFPLDPCPPFYAVRDVGREAAGGAEYREI

SEQ ID NO: 108324 - protein, 173 aa, Unknown
  Obtained from environmental sample
  misc_feature (1)..(173): Xaa is any amino acid
MIPAYYVFKNSKKDNKTSVMEHYINNCISLGCPSEIRKDXDHMIIIDYISANTDRHWANFGIIRDFNTLKAKKLAPLYDNGAALFAKINEAVIHEENYNLECQSFCKKMEDSMRLVTDFSLLKNSNIDALPELINSIFNKKYMSQARINIISKNIKIRLNTAKKRIMGLKYQG

SEQ ID NO: 108325 - protein, 198 aa, Unknown
  Obtained from environmental sample
  misc_feature (1)..(198): Xaa is any amino acid
MVVHGIVHRHDLSARVAKNGVNTFLNQRQYKRLAADYFFAHKIVNSNLSNRQSSYPHRSLVRRAHHACIRAERFAHLALARNRGVSLLASRLLLRLALHQIFVRQLYVNAAVRNIYFNHIAVAQQGNLASCCRLRRNVSDGQPRCSARKTPIGDEGARLAQLFTFDVRGGVKHFLHTGTSARTFMADNHHISCLHPAV

SEQ ID NO: 108326 - protein, 106 aa, Unknown
  Obtained from environmental sample
  misc_feature (1)..(106): Xaa is any amino acid
MAGGPSRGEPAEDVAQGGGAKGREGRGRQRPGGVPDGLRAGRGIHPEEIRGRLEETSDGSAGRRMGHGRRHAKPAGTGTGRRRSDGRGRGRGRHRHAKPAGTGRAA

SEQ ID NO: 108327 - protein, 293 aa, Unknown
  Obtained from environmental sample
  misc_feature (1)..(293): Xaa is any amino acid
MGGGIFKXYKQDSKFEKLSETLERVVSFSKERNVPVFCGEFGVFMIQSPKEDRVTWYKIVSAALDKRNISRTSWDYYGGFGVFNSERGSFNHDLNVEVARAMGFTPPVQIKRETRTLTDGFVIYDDYPNSNYVTAGYWGNEVDFSLYDGNAAQGEFAIRWGNMSQYDAFYFDINSSIRDFSSLVKDGFYLEFKARAQRPVSFDARFINSEANTPWRMRYSINENILPPDGXWHTIRIPLAQMSEHGAWLNAAXKWLSPEGKFSWXDVXRLEFDSEHSSLKGVYIWFDDIKISR

SEQ ID NO: 108328 - protein, 408 aa, Unknown
  Obtained from environmental sample
  DOMAIN (6)...(357): RAMP superfamily
  misc_feature (1)..(408): Xaa is any amino acid
MAKKIYTITPVTGVHIGTGVELSPLDYTIAFIRDINKSKYLKFSSDRILQRLIDNKETEAISSFKNASEKGDMRELFNFFQQNCTKKEDIDYRCDITNSFEEKHKENSKKDPHKNAAKVWQMYHTDGTPNPVIPGSSIKGSVRTALLNGYLKNIANQKDLLEIQRKIEKDDKAGKYENDMKEKLLGGNDAKKDPFRAVLFSDCLFKATDTQLVGRLDNVYFDKQTNKLELATKRPKGFESNYNQTKSKAKGIQVQAEVLKGELLGGKAESELCITINDKLQNELPEHIKKIDFDFIKECCNEFFWSEFIKEYNKFYKEIGDNSNTLIEDLKSRLECVYNSKNENKFIIRVGRWSQVEFLTYEERFRKPKTGXKEDGTKKPYGTTRFLFDYNGKYVPLGWCILRKGSRV

SEQ ID NO: 108329 - protein, 212 aa, Unknown
  Obtained from environmental sample
  misc_feature (1)..(212): Xaa is any amino acid
MTLYSSLNSVALGVYDYSLADNTLEVRYSIGDIDRSYIIPPAAPEQRMAAFLENMETDDRRKVEASYRLYDINNLRSNDDKNSLLANYPELAKTKMYVLRDTTQEYMKETMEELFAQAGYTYDDYSEDSSLYSAPEGADKPAFNVTLRYSLEGKSMLLNVPFDRLAYRSAFPITKLSLLPYMGAGGTGDKGYLFVPDGSGALIYFNNXKYNH

SEQ ID NO: 108330 - protein, 108 aa, Unknown
  Obtained from environmental sample
  misc_feature (1)..(108): Xaa is any amino acid
MGWRGHWRWLRLRRRQRRHYHDQRRYGYSYGQHGRGHWRRRLRRRRRHYHDQRRHGYSYEQYWRGHWRRLRQCQHQRRQRRKYHDQRRHGYSYGRRCGHWRRPRRRFR

SEQ ID NO: 108331 - protein, 169 aa, Unknown
  Obtained from environmental sample
  misc_feature (1)..(169): Xaa is any amino acid
MGGADFLPFICFYSRFYNTLHFIIVPADFRKSPGILGKTGTAVTRAGVQKLGSDSAVFTHCAGNILYIGAGFFTEIGNLVYESNFYGQKSVRRILYHLRRFKAGFYIGSFIQVKGTVHVLHYFPRPFAPAADDHPVGMGKIIYGGTFAQEFWIGNHVKLNLPSALASLH

SEQ ID NO: 108332 - protein, 166 aa, Unknown
  Obtained from environmental sample
  misc_feature (1)..(166): Xaa is any amino acid
MIARETCGADIVRFVHAVWRVRLTGFDVRSCGCTCLFAIRFGTGRLIAAALGDGVVTIDNGGRPESLEYKKDFANSTDSMDNCKLDDWRFYDKQVFGGLKLMLATDGVSDDINEGGLFKFADDVINEVAKGTEQRERNGYVRRLLSNWPTPKSCDDKTLVVIKEDA

SEQ ID NO: 108333 - protein, 233 aa, Unknown
  Obtained from environmental sample
  misc_feature (1)..(233): Xaa is any amino acid
MITSPPASREARAVTAVDSEASRFSTAAAIWAASSPLGTRARARASGSCSAWASMSAATRSAPPEPSAMISTSVGPAMKSMPTLPKRMRLAAATYLLPGPTIKSTRGMVCVPRASAAIACAPPTAKPLSLPFFTGDEGSPAKLSAAIAAAARILRSGRPSSNGGEARIISSTPAQKAGIIAISTHENRGKRPPGTYTAALSTGITFCPVTSPFSISYSKSENCARCCRENRFM

SEQ ID NO: 108334 - protein, 146 aa, Unknown
  Obtained from environmental sample
  misc_feature (1)..(146): Xaa is any amino acid
MTCNRQIGRYNHNFKFVNLAEFRGLRVSGAGHARYFRVKPEIILEGDSRQRTVALGDLDTLFCLYRLVQAVRITPAVQNASGKFIDDLHLAVLHHIVNVQMKKFVGFQRLRKVVYVFKISLVDNGSLDKAAFLQNLLNNGKTMVAE

SEQ ID NO: 108335 - protein, 173 aa, Unknown
  Obtained from environmental sample
  misc_feature (1)..(173): Xaa is any amino acid
MKVFKDLSEQIKKLNGKSGMIIKVYLIISIIFVSVSVIKPIVNTNLKEKDQTTETKNNDFDGTNEFDQIYNERQLKDIMKREKDYSDRILLALQKTFSANRTGDLSVKFDICYNPEGPAGVEGQNPSAFKDMSNLYAEMNQKTDRVTVSDNIDGTWKINMTKKESDGPTGPYA

SEQ ID NO: 108336 - protein, 209 aa, Unknown
  Obtained from environmental sample
  misc_feature (1)..(209): Xaa is any amino acid
MRELRAQGAKFPIKILLTYNPNVASWPLEVQVVAQQLVELLGADYIEPVIEAGPSTNFLAEIRRGGKYAFLKGNNGAVAPEDPESWVYAFQPGLNWNFIDKGTGAETQATYARYVELVDKAKAITVKSEARYMAFAEAEAFLLSHAFVVPFCTDTDGYSVYRYDFFDGYGQNGYEGRKVLAEPMTGEQWKLLYADWQAGKQEALRNSTK

SEQ ID NO: 108337 - protein, 168 aa, Unknown
  Obtained from environmental sample
  misc_feature (1)..(168): Xaa is any amino acid
MVIIGLTFQEGTHPAREFHAVHRLGQEVVGPHFQGRDPVVYVLEGRDHDDGDQGQMGPGFQFGDHLEAVHFGHHDVHEHQIRRVRLDLGQAIGAVLGQDDFIALGLEHGQEELAVQDLVIHDHDLGRPGPRRGVRRFGRGRRFRLVQAYFRNFRQKTPRLKTLSALLF

SEQ ID NO: 108338 - protein, 106 aa, Unknown; identical to SEQ ID NO: 108034
  Obtained from environmental sample
  DOMAIN (8)...(89): Nucleotidyltransferase domain
  misc_feature (1)..(106): Xaa is any amino acid

SEQ ID NO: 108339 - protein, 111 aa, Unknown
  Obtained from environmental sample
  misc_feature (1)..(111): Xaa is any amino acid
MFSPVSMESNNAPIWKSIPIFLRIVCVSKDLGVEIVTLSTLTSPPSGCKSPIMCFNITDFPPPDCPIITIVSPRLISRFTSNRTSCLPKLFRKLRSFIIMSSSRIATLGIY

SEQ ID NO: 108340 - protein, 108 aa, Unknown
  Obtained from environmental sample
  misc_feature (1)..(108): Xaa is any amino acid
MIFFPSTAASLSPFSILYSFITLLTIECPRRVKSKWPLSSVRCVPATFLIYTGYFKVILLSSLALVATPPMWKVRIVSCVPGWPIDCAAIVPTASPISTVRFVARLRP

SEQ ID NO: 108341 - protein, 212 aa, Unknown
  Obtained from environmental sample
  misc_feature (1)..(212): Xaa is any amino acid
MSSIPPCPASTLQTKSLSASGCLPHSTTCPTSTSFRSAKGCLMSSTSRPSMVNLSLIVCAVASQGVNSRSHFVLKSMASVLCKRFCSRAKRSKLREKARVIFEKHPQIADAVLEHGNALDTQAEGKTRHFLRIVAYGIKYRRIHHAAAENFHPARALAYAAGVFARMALAVADAAGNVGFRRGFGKRKEAGTETHPRFRAEDPAQEYGKRTA

SEQ ID NO: 108342 - protein, 299 aa, Unknown
  Obtained from environmental sample
  misc_feature (1)..(299): Xaa is any amino acid
MASVLFLAFLLSPKVPMPSDTASFFSTDPEQRAKAVYVVGSEEELVKVANAAVHSEDLSAEDFALCFPGETIKSQAIQNEAPVFSRESFREDLKIALMAIVPLALALIIAITVFARDRILNSDTVALGLLFAAFGMFILNLGMSGGITAISSQAGRSLRHTYRETVFSEKIVELKGVDENSFVTVLGEDGPETFIWVSGNKGPVLERFIPAQLSDDIYYHFPLKNGIFSRFGSLGTYLMILLIVFFLGFFAIFAEPGLAVTAVTVEEMTIGTFNVKNDIPGCHKRRRGHDPWFCPDTGQ

SEQ ID NO: 108343 - protein, 267 aa, Unknown
  Obtained from environmental sample
  misc_feature (1)..(267): Xaa is any amino acid
MKDGLRVMNQWYNEGLIFRDFPLWTVAEDTNNLIKSGVVGAIAGNWDTPYRTDSKITEDLRRTVPGADFVPLDITNNKETFDKPGLRMFVPAFSKNAEAALRYLNWLCIPENYQFLQRGNEGVNHVMVNGVPQIQSRPANDPWFYNSPQNIDITMPMNGVEMGSDEMNARVLAFSYGGYAPEVIVNAYQTSIRNGRAPVVVTGVVTTQDGIYGNVLSDKADALIAQAVTARPADFDRVYDEGYRDWMASGGQAVMDERAAIARTIWR

SEQ ID NO: 108344 - protein, 139 aa, Unknown
  Obtained from environmental sample
  misc_feature (1)..(139): Xaa is any amino acid
MFLKIIGYCHYRRRLLPDSAVYTNYIFPFLIDYCIDGDCRFSRLAVADYQFTLTPPDWDHCVYGNASCLKRRIHASSIYYGSGGSLHRHKNFGCYRSLAVKSFAERIYHSAEKRIARRNGYYLPCSFYFLAVFNKLFAC

SEQ ID NO: 108345 - protein, 107 aa, Unknown
  Obtained from environmental sample
  misc_feature (1)..(107): Xaa is any amino acid
MLLAVTTPSSITFSMETVEPPLKPNQQNQSMKTPSAPSVRLCPGIALDSPFLPSFVTAYLPIRGPTIAAPTNDATPPTMCTAVEPAKSWKPSSASQPPPHIQWPEMG

SEQ ID NO: 108346 - protein, 179 aa, Unknown
  Obtained from environmental sample
  misc_feature (1)..(179): Xaa is any amino acid
MVDVGAGDDAAAGDEAGYRHALAAGVAVHKFGGWKLFVERKYRPVFIVQVQRGLDVGEIQVGLPVRVEGADIPPVRLGLVEFLYGTFPKAVCKHAVFPHSLWYDVLAEIVAGVGVGGIVGKLFVQKVGPKKVDAHAGQAGVWLPRDRRRVVRLLYKGHYSAVPIHLGYPEMVGGTLVDF

SEQ ID NO: 108347 - protein, 100 aa, Unknown
  Obtained from environmental sample
  misc_feature (1)..(100): Xaa is any amino acid
MGELRLTVAPRVFVAVTAGDLEILVEAGHHQKLLVKLGRLGQGVEFSRIQARRHKVIPRSFRRRADKGGSLDLIKSVRPHPLPHGECHLAAQADPFLHGR

SEQ ID NO: 108348 - protein, 159 aa, Unknown
  Obtained from environmental sample
  misc_feature (1)..(159): Xaa is any amino acid
MFIARMGREIMTERSKRMIAELDPRAQPIFVDFHILLDKELGESQYITYEGLRKSLVQEAYYAQGRQSLGAVNALRCLAGMRPLRSEADNYIITWTLKSKHIDGLAMDVLPVDGTGKETWDLGHYWKQFNIILDCGRAVGLICGADWKPADWPHHEIRG

SEQ ID NO: 108349 - protein, 254 aa, Unknown
  Obtained from environmental sample
  misc_feature (1)..(254): Xaa is any amino acid
MEIFRLIFSKIVWIIILICLGIGLIILRKYVLNILKRRREKRSDERLIYAIEHGLYRETVGCFNDEAPEGYHLYKEAEICLFEKNKIQEGIDILINGIKINPNIEKMYKLIVYAYIKLKMYEQAIKYSTEGLTITESIKIEEEDNIQKCIFEQNKKDKIKYLKLSRGKAYMEMKDFNNAICDFTDIIKLYPPDYEHFYNCYIFRSKAYMEIGKFDLARLDLEKALKYCRKYNHSVKDTFDLLEILKQKENLNKT

SEQ ID NO: 108350 - protein, 287 aa, Unknown
  Obtained from environmental sample
  misc_feature (1)..(287): Xaa is any amino acid
MQRLADGAVVGAVFVPGKDVYMAGSVHVDGIGEGKDVLTLWKNGAARQYGAMGGHGKANSLFVAGTDVYIACEEDNVATLWKNGVAQRLSKSPVAESYDSAKSVFVSGGDVYVTGYEKNELTGAIMPTLWKNGAARHLDCGDCFSAWGQSVFVSGGDVYVAGRGWNAQDQEAALLWKNGRVLHLTGWNDRNSAESVFVSGNDVYVAGYEDNEQGESVATLWKNGRARRLSDVKGSTWAYSVFVDGADVYVAWCGLGYGDNGQITVPMLWKNGSSQHRKTGSADLIIR

SEQ ID NO: 108351 - protein, 119 aa, Unknown
  Obtained from environmental sample
  misc_feature (1)..(119): Xaa is any amino acid
MFSPNIGDFFLPTFNVNFNKLRHRFGAYAGGRFNASRFWQVADGRFNVVVYTVATVKNPREDAAVFTVTGPHEFAFGVFAEPVDKEDFRQFVAVAFVFCILAKFEPVGKIIAHVVTAEG

SEQ ID NO: 108352 - protein, 182 aa, Unknown
  Obtained from environmental sample
  misc_feature (1)..(182): Xaa is any amino acid
MEKLRGIDDRFANAFKKNELYELYNDNKDKDELFLGVRNNCLNIYYNCGSVVKIEYKNGKFFYDINDAFLDNKPDEITPCFICDNYEKIKDKIIKYKGVEGKAQSKLVYLNNNNESSEWFCVDIENANSGFRGRFDIIAITKESPHKTALIELKYGARAFDGKGGIYEHIENFSKFKKTRLF

SEQ ID NO: 108353 - protein, 138 aa, Unknown
  Obtained from environmental sample
  misc_feature (1)..(138): Xaa is any amino acid
MSYEHNLLGIERGEAADQRPVVAEAPVAVQFYEILEYKRYVVVEHRTFGMPRDLHGLPGGEGVVYLPLTLLALPFEFGYLRAEIALALGGRALELLYGLFEFGHGFFEFKFAFQFRPLTYYSMKVYGAVCSSYPVYAR

SEQ ID NO: 108354 - protein, 197 aa, Unknown
  Obtained from environmental sample
  misc_feature (1)..(197): Xaa is any amino acid
MQGNRVLHALYDEFVQRARRPPQARRPVDRVDYQLCDHRIVTRRNPVSRIGRAVHPDAEPPGGMVLRQRSRARREGFRILGINPEFYRVAPRNQVRLGISQFFARRDADLFAHQIDAVHHFGHRMFDLQARVHFKEIKFAVLVHELHRSGVRIAHFFGGPAAHLYHPRPFVRRNRGRRTLLHQLLLLRWSEQSPRPI

SEQ ID NO: 108355 - protein, 276 aa, Unknown
  Obtained from environmental sample
  SIGNAL (1)...(30)
  misc_feature (1)..(276): Xaa is any amino acid
MFFVMKHSQKLIILELFPLLFLFSCSSSSGGDPDGSIKINYIEYRQEIDGFGGSNAWTGVPRNLETAQKLVKLLYSRTEGIGLTILRNRIPFRERLQGDDSSGLNDGFVVRKGDNTYDYTVNPDGTKTFNLNWGSWDLAYTRGFIRQILDLAGEGPEKLIIMSTPWTMPNNRVTQWKEDVAGVSEKLDYKIDWNKPDVWGRLKMDKYEDYADLLADYALNFEAKMGAPLSVLSIQNEPNYKTDYESAYWNGTNMRDFLNIAAQRFEKKGVLSARPI

SEQ ID NO: 108356 - protein, 277 aa, Unknown
  Obtained from environmental sample
  misc_feature (1)..(277): Xaa is any amino acid
MRKPPRTSFTSGWPRFWRRSGRPGKAGSGAPAGRCQSRSRRLWRRPPRRKFPTTPRNSLSGNTCARSCKAWWPLLRLSMRTYCAPWWPSSSASAGPAVKYVPARCQWRLNCLNNRRRMWASFSGTRGSRRRPAPSFGREAKMRSAWSMKSPCRNWSPWPARSRWAMAKTPSWSWAGALGISRLRARQAPQAEKAWGFEPKKKTRSPVYRSASPRSKSPPSRRRNIRLLGGSLSRPKNSRGLPKPRKPGLEPPRESGNLGLPFPPPRFLKILPRRFWL

SEQ ID NO: 108357 - protein, 222 aa, Unknown
  Obtained from environmental sample
  misc_feature (1)..(222): Xaa is any amino acid
MRVLLMSNTILLVFEGEKIEGQVFNSIKKIFFTNSSEKQIIRSSFKAEIYQLWNEIKDDADLDIVEVLKQRPDSDIKDLARKDVSEVHLFFDHDGHSHSDIISPEISLQDYNHYYNEMINKLLNTFNNEFEQGKLWLSYPMTEAIKHCTNNPNDCFKDILLDMSDNINYKNIIDRISHYKDIKKYDESTWHYLTMINIQRTFCLVNNTYEAVSDYQNIKHLV

SEQ ID NO: 108358 - protein, 108 aa, Unknown
  Obtained from environmental sample
  misc_feature (1)..(108): Xaa is any amino acid
MSIARWNLKEAGGKVPGRRTETAYKALQGGRVCRPKRSPKGRGGREQTPTVLPEPCSVDAAARWDEGYRLLLGEVWTVCARMRILSNPYSDVWLNVQKSAEAIVPRRG

SEQ ID NO: 108359 - protein, 108 aa, Unknown
  Obtained from environmental sample
  misc_feature (1)..(108): Xaa is any amino acid
MPVKMPAPRAWTERPHEPSLHLGVGFRRRVRRIGGRLRSPASGPGGAVLEIPPLRRLRPNRASEKDAGTVPGGQFDWGGRLPKSNGGIQRSPRAGRQPAPRAQRQKVA

SEQ ID NO: 108360 - protein, 126 aa, Unknown
  Obtained from environmental sample
  misc_feature (1)..(126): Xaa is any amino acid
MTHPTHPPRTSAGHSQSGYLTQGSASEMSVSSNASASRSDSASMRLASTACRYSIGCSIVSPFSQISSVQTSKSSFQIKMSSPIRATHLKNSSSFSISSTTLTYCPFSRFLSSHGSSASSSSPRDE

SEQ ID NO: 108361 - protein, 116 aa, Unknown
  Obtained from environmental sample
  misc_feature (1)..(116): Xaa is any amino acid
MPQASAEAPRWAESADPRPREEHRAPRDARRDTRSHPPARPSAYPAPQNAFGCKSGNTPHNAPPREPVPCPGTGESXRAAVKSDPRRADQRSHPHRRAQVRADRERIASRAHPPRA

SEQ ID NO: 108362 - protein, 243 aa, Unknown
  Obtained from environmental sample
  misc_feature (1)..(243): Xaa is any amino acid
MAGKDYVDFAPLKDFAHHSTWLFVPEKALAYKEQAVREMRAQGAKLPIKIYMTYNPNVASWPLEVQVVAQQLVELLGADYIEPVIETGPAANFNAEIRRAGKYAFLKGNNGAVAPEDPESWVYAFQPGMNWNFIDKGTGVETQATYAKYVELVNKAKAITVKSEERYMAFAEAEAFLLSHAFVIPFYTDTDGYQVYRYNFWDGYGQNGYEGRRVLADPMTSEQWKLLYADWQAGKQAAIAARK

SEQ ID NO: 108363 - protein, 148 aa, Unknown
  Obtained from environmental sample
  misc_feature (1)..(148): Xaa is any amino acid
MGEYFSSPSDDHVLDAACNLKVAVTGFYAQIPRMEPAGLVDALCRFFRHLVVAFHGAVAPAAKFAVYPVGTFLAGFRVADCNLNAVKCTAHGFNLYLNRVVKVGLGHHRRRLSKAVADGYLAHMHKVDDFAHGFDGAGRARHYPGTQA

SEQ ID NO: 108364 - protein, 104 aa, Unknown
  Obtained from environmental sample
  SIGNAL (1)...(21)
  misc_feature (1)..(104): Xaa is any amino acid
MIRIIVFILVFVFFLAFIVLNLENKCDVSFGFTTIKDFPIFLSVLSSFVLGMFITIPMMLFRKKKPESLPEPKSKLSIFSPFKKAEIKSVPDEIKKEDSPYGID

SEQ ID NO: 108365 - protein, 292 aa, Unknown
  Obtained from environmental sample
  misc_feature (1)..(292): Xaa is any amino acid
MSGSGSRVIFDSSSSVSSPPPGFVMVNDDNAFGNVTCIGTVRFADNSNQTIQDLTANGATLQSNSGGSGGVAPQWNLLGLAASNFHTNSATKIYDCNSNLPLHRVDGTDAVDGGNNTKVFGGLTYRWIGSGSDANWWTAGNWLSSSVPWSGGSSGSSTLTNLDILIINRTGSYDATAPVPLTADNIDIQNGKLTLGGGLTVRKVEIKSSGTLDLDVYNITGIAGNSDFTNAGILICSGNTISGLTSAYSMGGNVILNGEFPTEATKILSYHDLTINGGSSSFSRTLTGTRKF

SEQ ID NO: 108366 - protein, 104 aa, Unknown
  Obtained from environmental sample
  misc_feature (1)..(104): Xaa is any amino acid
MFARRFQIGDQCHMDKQAVLAAFFKGDLPDSLQKRLAFNVAGRAAYLGNQNIGAAFFRAGVNKTFYFTGDMGNNLHGAAKIAARAFAVKHVPVHLAGCQVAELR

SEQ ID NO: 108367 - protein, 279 aa, Unknown
  Obtained from environmental sample
  misc_feature (1)..(279): Xaa is any amino acid
MIRFQNSLGVFHAEIFGFGIFPGKADDKVKVIARNNEFRRVRLHQVEFFKLLLYGFLYLAFKFKAFNNILKPLVVGTLGVGGHPQLALYGLQLFFKEIIPLRFFDFFVYFFLYLFLNPQKLLFLFDENQHLLHALSHVEDFQNLLHLRLVNIEDTGDKIGNFARMVDVYHVEAHFLGKQGVIFGNLLHFADQRPGQCFYFIRIVFFVFKVLHCRDNRVSGMKGFFNLKALQCRNEDVHPTVRKVYFFYDFRNGTHLVKVANGRGLGLVVEHHKADKGIA

SEQ ID NO: 108368 - protein, 234 aa, Unknown
  Obtained from environmental sample
  DOMAIN (2)...(134): Diacylglycerol kinase catalytic domain (presumed)
  misc_feature (1)..(234): Xaa is any amino acid
MRHLFIINPAAKRINGKTRRVREAIAAFFGEYPDIHYDIYESGWCRDSVTFIHRYVSEADETVRVHAIGGKGTFFEVVNSVVCLANAEVAAYPYGRENSFLKYFGRQNERLFLSLKSQVFDKAIPMDVIRCGNNYGICYGVAGIEAQARVLGDDWIEMGMATDISFMLAAIFHILSSKTSQNYHVDIDGVRIDGDFVSVLVANVPCYGINMSSAVDAHPDDGVLDVYTFKETSK

SEQ ID NO: 108369 - protein, 171 aa, Unknown
  Obtained from environmental sample
  misc_feature (1)..(171): Xaa is any amino acid
MGIRGQRRQPGSARCLAPAGILYSGTGREPGGLRGLPAGKRGPHSGRAAAHRFAPSQSARPVRHGRQCGGNHAGNLPFFAWQPAARLGRGRGAQGRGLQRFQGRNIARPPRRSSPAARARTDPDPRHRRPFCALGHQYTRRRPQRNAEKGMGFPWRAQRADRARRQSLAGT

SEQ ID NO: 108370 - protein, 130 aa, Unknown
  Obtained from environmental sample
  misc_feature (1)..(130): Xaa is any amino acid
MQRNNVRPLVEKLVERVLAVGSRLAENHGAGTVSDRLAVAVYPLAVGLHVKLLQMRGEAGQGLAVGQYRGVGMAQKVPLPNADERVKQGGIFLEVRPQGQLIRFRRAGKEFPECFRAEGEGQDTAADRRG

SEQ ID NO: 108371 - protein, 205 aa, Unknown
  Obtained from environmental sample
  misc_feature (1)..(205): Xaa is any amino acid
MKLYNTPQEYYFRLHHVRPRFKEDIENVLLFIATEISRLSGSKKDEFNNKLNEAIKMYPGNKIKTDKTIDNWRTEIAALFSFYFESYDETIFAGTRARELAEKQDLVEMFKKFLFLFQYPGGHIKAEKILEMIESGIHFKPAQYILKVLQAGETDTGNRTFLLREEVCHCIFNDLRCTRDNEDPLIVWKRIKTNRQNEYNYDKTR

SEQ ID NO: 108372 - protein, 130 aa, Unknown
  Obtained from environmental sample
  misc_feature (1)..(130): Xaa is any amino acid
MAVAGTRRRGIVGLLRHRHGRGHRRRHLRLHRHGRRHRRRHLRPHRHGRRHLRPHRHGRRHGHRRHLFLRAAEYLVELSHDVGAAELIAVGTAEPIGVGAELLDGRREPRAARKAALRTDGRRSDGAARR

SEQ ID NO: 108373 - protein, 135 aa, Unknown
  Obtained from environmental sample
  misc_feature (1)..(135): Xaa is any amino acid
MAERWFLNLIISCLPDLSYREKVLLCESLGDESDLLQKSGSDIEALIGRELNAWDVDSSRREARRTAEKIAEKARVRGINMVSWQSPLYPPLLREIYDPPVLLYFRGKLPDPGKXPGGDCRDKKAQSGFMRASAI

SEQ ID NO: 108374 - protein, 105 aa, Unknown
  Obtained from environmental sample
  misc_feature (1)..(105): Xaa is any amino acid
MVKVRGAIIYPSRVDELLATIEGVISEYHIMIDHLNGKDILTLFFETRETGDAAHNLVKTVEHEFKERIGITPKAKSRWHGRISKKREKIYSGVLITGTIGYFGV

SEQ ID NO: 108375 - protein, 105 aa, Unknown
  Obtained from environmental sample
  misc_feature (1)..(105): Xaa is any amino acid
MRVKGKDQPVGLYTVYAAYRGEEDEQTPASIVIGRESLDQYNKGLKLYAMREFETAKQYFNSTLSLEKKAGIDDYLAAMYLSRIEEFQINPPPPDWDATITMTEK

SEQ ID NO: 108376 - protein, 309 aa, Unknown
  Obtained from environmental sample
  misc_feature (1)..(309): Xaa is any amino acid
MRGLEKKKLIRCSRDGNGVSYRIPHEVSDSLRKYNEFRPEKLDNLTMSKFFVTLEKILDERGNSELTYDTMKMEIKDLIDQNMQLLFCRKIMSYNLYDDDLILLVCFCHFSGNNDDDNIGTHDIKFLFDDTSTYYEVKRQLTRGAHSLINGKFIEFTNNNGFVNSDSWKLSDMAKKELLSELMERPNYQKDLILFDKIKPKKMFYNAKEAEAIKKLNSLLQEENYSKIQDRLEGKGMRKGFACLFTGGPGTGKTETAWQIARETGRNIMMVDIADTXSMWYGEKRKKIRKFLTTTVTRWKIPNRPYPVV

SEQ ID NO: 108377 - protein, 119 aa, Unknown
  Obtained from environmental sample
  misc_feature (1)..(119): Xaa is any amino acid
MSNLSLFEPATWQVPSSSTFTVQPEASMIPLMVAPPLPIMSRILSLGMCSVTTLGACSLTSGRGAGSISSIASRSSSLPFLAWARALVSSSASTPPILMSIWRAVMPLRVPATLKSMSP

SEQ ID NO: 108378 - protein, 110 aa, Unknown
  Obtained from environmental sample
  misc_feature (1)..(110): Xaa is any amino acid
MSVVCYPLSVIRCLLSVVCYPLSVVRCLLFVVCCPLSVVRCLLSVVCCPLSVVRCLLSVVCCSLSVVRRPEILQNPRTLPPPAENRYPPYFSGFRRGSAGGRGRGHNIVS

SEQ ID NO: 108379 - protein, 126 aa, Unknown
  Obtained from environmental sample
  misc_feature (1)..(126): Xaa is any amino acid
MQVLGGLIMESYLEMLPLSGIAKYEGQQKDAIPFAGYPRQHPSEKNNLILVYDPLGPSPTAMEFKLEDVLFVEEVPSPVTESGEGIPLVQLWVRKGAHGVILEPFEVDKPLHFANKSREIRDRFRV

SEQ ID NO: 108380 - protein, 201 aa, Unknown
  Obtained from environmental sample
  misc_feature (1)..(201): Xaa is any amino acid
MAFMENEQAAFTGTDPEVEKLDVNIKEYKADWISCIVLFCIGLFALISGILMPVERLTGSSELWYAAPGLFPAFIGTVLCILSAILFVDSFFKYRKYRKQSEGRSSFEYFKSKHFLRLIIAIALLAIYIFVFIRRIPYYAASFIYLLVNMFIFRKSGYALWKIMIICIVAVAAITYGFGTLAKIPLPXXNRQIRRYSFGNM

SEQ ID NO: 108381 - protein, 240 aa, Unknown
  Obtained from environmental sample
  misc_feature (1)..(240): Xaa is any amino acid
MRRLFFPDCSYPLRPLLLSFGTAHMNILAVVGIDIHLFDFLNQGVPGIRAGTLIVKSLFAHLVKAGKKIFFINAVILDSLFNPNLLFQPFHGGDQVFKFFLVVFAGKIHGIRDFRVTGKGLGMIVLREGSHFGRNFDGVVAKHFADHQGIGDAVGYVMERAKFVRHRVADAEEGVGEGHARYGGGVRHPFPRDRIRGAFVVSFGQPFKNHLDRLYRKAVGEVGGHDRGVGFQCVGQCVNA

SEQ ID NO: 108382 - protein, 230 aa, Unknown
  Obtained from environmental sample
  misc_feature (1)..(230): Xaa is any amino acid
MIKSGVVGSFNQNWDLPYRTDYKIHEELAKNVPGASYIPVDIGLANKSKMDKVGLQMFIPAFSKSQKEALQYLNWLSKFENFNYLQIGEQGRNHTIVNGVPQVIASTDPKWIQNSAQNIDITMPLNGVYLGSDEQNAKVLALSYQGTPAETIVNAYNISVKDARAPIVHGGIVKLTQYTQVLTDKADALLAQAVRCPPAQFDRIWDAGYRDWLASGAQDVINERISLWPK

SEQ ID NO: 108383 - protein, 140 aa, Unknown
  Obtained from environmental sample
  misc_feature (1)..(140): Xaa is any amino acid
MNSGIIISQEIIAITHDVWYNAIFKKHSWRTDDYTTSSYGFNSDFNISLGNLSRDQNIIAKRTNIRNIQLEVGELMKLLINPPQDLENIYIDLDKLYRVYTSYTEIALNPSGSLNTFTSKINDYDAEYVQCYNKMKIYIK

SEQ ID NO: 108384 - protein, 181 aa, Unknown
  Obtained from environmental sample
  misc_feature (1)..(181): Xaa is any amino acid
MELIDWNAAKKTCPDGWHLPSRGEWNDLVRTANDNSETVNSVKTATEATGSFLGLMASATTLSVDGMTKNFVNLMNNVMKFAEELDAVEGNVNAGERLKSKEYKGTNNFGFSALAGGGYSSNNEVKFYYIGKGGAWWTSTEKKDNNKEAYDVFVFSDSKSVREGSFSKSDGYSVRCVKNLK

SEQ ID NO: 108385 - protein, 138 aa, Unknown
  Obtained from environmental sample
  misc_feature (1)..(138): Xaa is any amino acid
MKAAVHKAVHHILKLLRVHLPVRGFRQNLRHKAFDPYPCIPQGFDPVMEKEDLPSPLNLVPYGPDQPLVAVFLNDGLDWLPSGRGRRQQAHVADFQEAHVQGPRYGGRRKGKAVDIGLEFLEPLLVLHAETLLLVNDD

SEQ ID NO: 108386 - protein, 293 aa, Unknown
  Obtained from environmental sample
  misc_feature (1)..(293): Xaa is any amino acid
MAVAALDNYEEYRRGTTAEQRAYHRFIFISGAEKSAAFPLILRGVHLFEAQIALVINVGEKIETAKLLPFLKTLQETAKPVFGTTLTIGLSETGYAMNGVYQCAAQASEAVTARILSGSNSVIPWTYNEGRKRFFYPQNSEVKILNYLNAGNFERINFELENIMKLIRSTEGVSCDNIFFIYNQLAGGTIRRLSEMSINTSGFFLSHGNIYKSIASSETLERLSRCMGEFYKDLINYMRKDQGEEEVIDRILACFNKYYRTDMFFEDMAAELGISYSYMRKIVKEKTGKSSAI

SEQ ID NO: 108387 - protein, 145 aa, Unknown
  Obtained from environmental sample
  misc_feature (1)..(145): Xaa is any amino acid
MNKHVERFGNTSGCGRLALYDCLINLPAPGHIIRLNCQKLLQCIRRAVRFQRPNFHFAQTLSAELRLAAQRLLGNKRVRTCRARVHFVIDKMVQFKEVNYSAENRIYKRFSGSAVAQNCFACYGQSGFFKFFFYLICRGRLEYGG

SEQ ID NO: 108388 - protein, 113 aa, Unknown
  Obtained from environmental sample
  misc_feature (1)..(113): Xaa is any amino acid
MFGRHLNEVGGIFCRVGATLREVAHLAGHHRKTFTRISGAGGFHGGVQGQQIGLESDTVYRLYDHGGIVGRLLDLPYGLRHAIHGGRDFAQVVNHLVDQFLRLIGVAGVLLGH

SEQ ID NO: 108389 - protein, 209 aa, Unknown
  Obtained from environmental sample
  misc_feature (1)..(209): Xaa is any amino acid
MRYVDDGFLKTLKRRRELQLQLPPQVAVERGERFVEHENIGRTGHDSRQSATLLLAAGKFVRVFVKMRRYVKSFSQRRRRRHALFARFPLCAGHDILPHRHVGKERGVLKHKARVPRLRRQVYSLFGIEQRDAVQLYAPAVRLGYSRYAPQRHALAAAGRPHKSGYARVHGKVYVKGKSTQIPFDIAYEHPLPPYLLFGKGVDGHHKHK

SEQ ID NO: 108390 - protein, 214 aa, Unknown
  Obtained from environmental sample
  misc_feature (1)..(214): Xaa is any amino acid
MAGARSRRGAQGPRRTAIWRATRPCCSARGRGATRVTSRSVWRRPCSAPARTSLRRKSPVRAFSMSVSVRPSGSPVLRTSPGRARVTARPKWGRAKKRRWNTFPPTLPARCTSGTDAARPWATPWRVFCVSRAMTCRRNITSTTQAGRCACSACPSCCAPANTRACPWNGPRIITGDHISPTLPRSSCNGIPACSPCRKMRPCLRVRHTARTKS

SEQ ID NO: 108391 - protein, 140 aa, Unknown
  Obtained from environmental sample
  misc_feature (1)..(140): Xaa is any amino acid
MFFPGEKKKKNLGGPPHFFWGGGKKKNPPGGGPPPGVSRGGKKNIWAPKKFFFFKGGFSQKKRGFKGGRFKIFKKRNFFPNPPFFKKEEGNFFFQAPFGGFFFEKRGGVFSLLKKKRDFFPFGVFKSGSPDFLIFHSGRL

SEQ ID NO: 108392 - protein, 189 aa, Unknown
  Obtained from environmental sample
  misc_feature (1)..(189): Xaa is any amino acid
MPKKAPNITGITFYQFRDRGRLGLEIEDPNNPDVGIAQPVLKDYKKIMTNGYFSPKIERGKKIAFPAKLRWGSSEDSDGITIPIDFKDNPVFCEVMFTNPDDAEKLNAMMEINGKWFYKKPGVKSIDLSPAFFKNRLKGKQRLDFKLFAPPSSGTNDPDQGEDWRINYYHTLNAAPEFRIRYEPVVKIG

SEQ ID NO: 108393 - protein, 135 aa, Unknown
  Obtained from environmental sample
  misc_feature (1)..(135): Xaa is any amino acid
MRDNYELRAAAHFRQHSRKASDVGFVERGVHFVQNTDRAGTVAKNGDKQRQRGQRPFAAGKQQHVLQLFAGRLRGNVYAAFQHVAFIKQADITMPAAEKRLKNILKIPPDGGIGFPELLRGTLINVGDYSHHVGN

SEQ ID NO: 108394 - protein, 108 aa, Unknown
  Obtained from environmental sample
  misc_feature (1)..(108): Xaa is any amino acid
MEFRYAISLVLEAHLPFVREYQKENDLSQAGEESRFFEYVSETLLPLLEALHRLESDHIQFRLALVISLLLIYLLTRQSFTNKIICPLLTKQMNSEDRKLREPRITMN

SEQ ID NO: 108395 - protein, 145 aa, Unknown
  Obtained from environmental sample
  misc_feature (1)..(145): Xaa is any amino acid
MRHIVGLFGNGMTDIPNRVAEFGPGSSLGTGLCAILAGAREYYAFDLIECADNIHNLEILDGLVRLFKEKAPIPDNKEFPEVKPLLDDYSFPSHIFGDDILKKNLSDERIDLIKRALSGKSGTADDIVIKYIVPWEEYPGTYPEG

SEQ ID NO: 108396 - protein, 151 aa, Unknown
  Obtained from environmental sample
  misc_feature (1)..(151): Xaa is any amino acid
MHRRKDILGHEFLGDDYGVLKVVSAPRHKGNHHVPAESEFAQARGVTVGQHRSGVNLLPLSNANLLVYRGILIGALELGQLVSIELRESQYVAGVPIGLANDNFGSVDLFYDAGVLGYDHAAGVESGASLKPGPDKRRLRPQERHGLALHV

SEQ ID NO: 108397 - protein, 393 aa, Unknown
  Obtained from environmental sample
  misc_feature (1)..(393): Xaa is any amino acid
MQAVFSGRDFSGGVLYPVSANGTVYYLATFVSRNSLMRFPETADSLSGNKVNLQLTKLDNQNYRIASEQPYTGESKPYIGLRYTNPFQNWFPLPLIRSNNDTFIKVDGVGIFSIMQDPIDMNSIYFLAYADVPYKMAMIDQFQWQNTGLGFPLALTLSDKVIESEDYTYRYTNAALLGWINWSGYQWNNQVSFGGGYYRTAAFQDGKGAYEWKESESGFFAQTGFFFSYRRLSLQFNGASPINSFAPRLDMIFGASTKTRFPLSLTLFGAYDKNGMDLHGVSNTFGATIIDGFVLKEYPTHSGIELSWLGGGAISVGLFSFEMQKNLSHLYYNRFFGSLSLRNQIYDSGGHPEAEGIEINNLRLAQSLXLRIGMKISFLPIKPNSXCHRNXLF

SEQ ID NO: 108398 - protein, 181 aa, Unknown
  Obtained from environmental sample
  misc_feature (1)..(181): Xaa is any amino acid
MDIGAAGEKVRACLSNFIDGPCYSWLYMKAMTNRTGWMIEPAGYGETRLGGMKAYCKMDFLFPVGEEVYILDWKTGAKDQAKHSAQLMGYAAAASSNFSIPWNMIFPKIVYLYPRYDELEIRFSESGLTGFFQTIREQTESMYALCRDVEQNVPLDISEFTKSPSPFLCRNCRFQELCGPQ

SEQ ID NO: 108399 - protein, 112 aa, Unknown
  Obtained from environmental sample
  DOMAIN (38)...(101): LexA DNA binding domain
  misc_feature (1)..(112): Xaa is any amino acid
MEKNPASVRRVSFTEEAFNASMAAPASVRLTYFREEGMEGLSKRQKEVFDFIARYCTKNGFSPSLADIAKETGLHESTVAAYTNTLKQKGYVESEYRIARSLKITEKGMSFI

SEQ ID NO: 108400 - protein, 133 aa, Unknown
  Obtained from environmental sample
  misc_feature (1)..(133): Xaa is any amino acid
MPLLTSGRSIIHRCMGCFRISSRPPQVRVPITFIPSSRRIYTARFGQYGRSLFSSSPAFGTSFCLANSSALQCLICDFCSSARDFASGFLQIPPRDGHPCLWLTLPTAIRVADFHRQVIAHAGRTRRMRLTAQ

SEQ ID NO: 108401 - protein, 155 aa, Unknown
  Obtained from environmental sample
  misc_feature (1)..(155): Xaa is any amino acid
MRVYPDRSXCDPPPKEAAPRIGRNGTVVPSQAYDVCPGETIRDSQNVPHLSPSKAVNRLIVITHHAHVGLGIAEFPQQLKLGDVGILVLVHQDHPETAADARRYLRILPENLHRFFDKVAKIHIADPSELLLVFRINPAEKFPVIDTVKLRIPGG

SEQ ID NO: 108402 - protein, 157 aa, Unknown
  Obtained from environmental sample
  misc_feature (1)..(157): Xaa is any amino acid
MECQACWVSVTGFRIKNVVKLIPLLGISSVIFYFLHVILGEIFYEGYNPLAQAISDLTASNSPSRNIARIFSTFYGICAVSFSIGLFAYLRNKINKVVTVSLFIFCIMNIISFFGYTFFPLSEPGYANTFQDKMHMIVTVSVVVLTIASLVLYSVGF

SEQ ID NO: 108403 - protein, 205 aa, Unknown
  Obtained from environmental sample
  misc_feature (1)..(205): Xaa is any amino acid
MTNRPSVDAWSVTEPGSSLIQPPGMGPSAVCFTTNVKVRPFTVVALSTSSDVPAVAPAGSPGFAAAVYKSVFSLLGSRNSSENVTMSVSLPPSKFSYILGLPPPAPSLGSPLASNGPMPSYTSNDFSDAAAPPAPPITSTSPVPNPVIEVLPVGRSAPLNTALRTRSLLAVISAPDAVSVTPLQLSVTVLGNLTPAAVSEALPSL

SEQ ID NO: 108404 - protein, 250 aa, Unknown
  Obtained from environmental sample
  misc_feature (1)..(250): Xaa is any amino acid
MIRWPRYATAIIPVIVNAPGAIGIAAQPQGGTVTVAPAATYPLTVEVVAIGDVSYQWYVNTVPSNTGGLPIQDATGPTYEAPLGTIGVFYYYVVVSVNNDPSVEPEKSMLAIVKVEPENVGVKSTDRIIPDPSSSAIDKEVSVAPVKALAPQLTAGPNPVSRSSGKISFFRNGSRVAYATLSIYDASGKVVKKIRVIDDAVGSQTRRKVSSWNLRDNKGRLVSEGTYLVRGVVKTAGGKRERVEVVVGVR

SEQ ID NO: 108405 - protein, 174 aa, Unknown
  Obtained from environmental sample
  misc_feature (1)..(174): Xaa is any amino acid
MVQQTVRDKDADHGDRSGTVGMRAVIRLLAPRANLQSLHGAHQFRPKTLPQNLDGGVGRQVRGKPEQRDRVRPQVPEERPQHARKPRHSDKRSRGRGRGGYLRGHEVLARQRAESCYAPPDDHRARGEETTGENRYKKARRGYSLRRRRVKLRRFGVPVHPRQDKRRQHRHNPG

SEQ ID NO: 108406 - protein, 103 aa, Unknown
  Obtained from environmental sample
  misc_feature (1)..(103): Xaa is any amino acid
MGLRQRGRLSRGGSRGPRRDFAAGQAGPPGAHGDRSRHPQDHRHHRDHRAGRGAGAGVRRPALRGHLGRGARRDFCRPQRRRRRSDRRRPRPVWPRAGGPDSG

SEQ ID NO: 108407 - protein, 191 aa, Unknown
  Obtained from environmental sample
  misc_feature (1)..(191): Xaa is any amino acid
MSWGGIPGSRRSVGLVSVVLGRVMAGRYHDARIAAQIPDGERQFRRGPEAGKKPGFYAVGAKHQRGGQGEFRRIMAAVKGDGRGQFPGFCLIGKGLDKVSRQPLRRAFHHKGIHPVIAAAYYPPQAARSEFQVAVETVFQFLVIPSGKKFLHLGAKPFVSLSGNIIFRPFNDCLGIHKKRSFLKDTIIIAN

SEQ ID NO: 108408 - protein, 132 aa, Unknown
  Obtained from environmental sample
  misc_feature (1)..(132): Xaa is any amino acid
MGPCRHPIDRQAAQQQPEKRLQNGRAADRQVRHREEARPARRRLPPIRPRLHRAARGARGREEGQQAKGRKESHRKGEGAGRRSRQGRPAAARAIQAEINAQTERVQGKGPTQGRAKQAYGTKRSKTRRQHG

SEQ ID NO: 108409 - protein, 103 aa, Unknown
  Obtained from environmental sample
  misc_feature (1)..(103): Xaa is any amino acid
MLTNASTSVKLLNTNYKEVSSVDVKTNEYGSFSGHVVLPTNGLNGQYVLQNESGNMLFFGGRILTTLRLKSPPSRLKTVYQLDKDLIVACVAKTYSGAGLGQS

SEQ ID NO: 108410 - protein, 149 aa, Unknown
  Obtained from environmental sample
  misc_feature (1)..(149): Xaa is any amino acid
MIKNDFDNRAFFQFDNDANPIAVGFIVCVCDAVDHLVAHELADFFQQHGFVHIVGYFGKNDFFFALLGGFHVKFAPDKEFPPSCLISLYNPLSAKNYSACGKIGSLNKAHQVVIVKVGVVDKGANCVANLAQVVGSHICRHTDRNPAEP

SEQ ID NO: 108411 - protein, 122 aa, Unknown
  Obtained from environmental sample
  misc_feature (1)..(122): Xaa is any amino acid
MGRVFFFFSFFGGKKINKRRGFFLNNFFSPQKKHIFLGGGGGKKKPRKCWFFSFIRGGGETVLGGHKKNIFFLFFRPQRFYFVKTAPKKGKNFFGPLFKKRGTFPEKFFGGVGGGQEHPPPF

SEQ ID NO: 108412 - protein, 183 aa, Unknown
  Obtained from environmental sample
  misc_feature (1)..(183): Xaa is any amino acid
MILPMKKVCLVVQDKHQDEALAKLREAGIVHLELSKPAPEKFTAIMERKTQTENAISLIRQFKPPKVKPKPQQPGGWERRKDTGPRRGRRACDRLGHEEQEPYSADAVNAPNRPELVKLMNGIANERKSLEEHIAFLAREQARIRAWGEFDPEAVKALNSGGVALYLYELSPEIFRNIPQDTR

SEQ ID NO: 108413 - protein, 127 aa, Unknown
  Obtained from environmental sample
  misc_feature (1)..(127): Xaa is any amino acid
MNLVNKKNGFFFFHHFFHDAFDSFLKIAAVFCARQKSAHIKRENTETFQSRRHVAGDYSLREAFGNCRFSHAGIPYMNGVIFQPSAKYLNSPIQLFFPADDGFEFIVTSQFSKVYRVTFKRGLFALL

SEQ ID NO: 108414 - protein, 158 aa, Unknown
  Obtained from environmental sample
  misc_feature (1)..(158): Xaa is any amino acid
MQNNIQQQRQSVKKEEQTSPDVQTSTQNDGRKTGICPNCHAELPEEALFCPECGLSIKQRDCPKCGAPASATADICQSCGAWLLEGKCKFCYADLTSDDALFCPECGKPKDGIPCPNCGTLSIFDFCSKCGKPVTXRSHCGFKTCSGRNDKPDIIYRT

SEQ ID NO: 108415 - protein, 138 aa, Unknown
  Obtained from environmental sample
  misc_feature (1)..(138): Xaa is any amino acid
MAKPISDEKRADIVRHMEAGRSRAEVADWLFVCVHTVARVWGKYRRTGSCSPEPQNAGRKPLVSDEDMARVTARIREAPDATLQELIDGLGLPISQAALSKRLIGMGFTYKKKRSTRPAATGRTSPGRGRRGLRARKG

SEQ ID NO: 108416 - protein, 196 aa, Unknown
  Obtained from environmental sample
  misc_feature (1)..(196): Xaa is any amino acid
MVDFYRRVPKEAPDIAGITFYQFRDRGRLGLEMQDPNNSDVGIAQPILEDYKKIMTNDYYSPKMEQGEKIAFPAKLRWGSSEDSDGINIPIDFEDNPVFYEVMFTNPNDAEKLNAMMEINGKWFYKKPGVKSVDLSPAFFKNRLNGKQRLEFKLFAPPASGTNDPGQEEDWRINYYHTLNAAPEFRIRYEPAMKIG

SEQ ID NO: 108417 - protein, 159 aa, Unknown
  Obtained from environmental sample
  misc_feature (1)..(159): Xaa is any amino acid
MKRIYLCGPVSNRKLHEVVDHFAKVEKIIRNSSDKPFLTSNPMRFCPPDIGCWFKEMRICVGELAKCDGMALLQGWQESAGAALEIKLAQNLRIPIVYVEPPVDSLNLTELFTAAPETLRYYNACITKLHNEGTEESLAENRAVAELSNVTSTRTGLSI

SEQ ID NO: 108418 - protein, 282 aa, Unknown
  Obtained from environmental sample
  misc_feature (1)..(282): Xaa is any amino acid
MAVYALHRQTLHESRLHVRRTPRPHYIHKRRGEVFEGQLRHARRVAAGDHRLQPRPQRHTRRGGETGHTRHSGHSAKARERLLPLRLEKLLQLLRRRIADNGEAGQILQRRKILPKVFGDRNQTAVRDEARRPLQGIRHKRGRFQGAQPEFATGGIFAEEADTRRLQRKRAEQHKRRDGRRRAEPHPPANADNAERGCGGCGDGGLLYNSKRRQPRRNSEAPGRPDERPRGGEQYHELEQDTGGSGAVDTVGRVWGGMGSDDHGVQAHAEGGGCRYNKDFCR

SEQ ID NO: 108419 - protein, 165 aa, Unknown
  Obtained from environmental sample
  misc_feature (1)..(165): Xaa is any amino acid
MAAHRPRQSRNGSGACRPNTRARGEGRGGAARTDRAAQLRRGAGEFFYRGEHAHAIGGERRRRGFASEPYEGRVFGRAERSFEFGQADRHVEHLARGAAAAYRGGSNRPRDHKRPAGAGRRQTGFAARRRADVAACFGNERGSRSQDADLGGGRAAXPRRIFGTH

SEQ ID NO: 108420 - protein, 325 aa, Unknown
  Obtained from environmental sample
  misc_feature (1)..(325): Xaa is any amino acid
MSIDAPWVFDTSLVFPVDGDTTPCRKLSVDFSMNIEAWSDLIVNLILXAFRIPILKSLVFQAEQVVLDFSENRKSNLVELPKSYIQTYFPDDENLWRGVFINSLKVTLPEYFEGYEPISFRVHQSLILDELGITGTLMAKQVIPKGVAHIGGWGLSMDTLNLDFLANHLKLGYFTGSLQLPITDTSLTYVGQIFENDRYLMQVNLNSNIQFDCWKTASVRLNNASFVKMELVEKRFLAQAVLHGEMSLKNGSILNVSSIEFENLTLQNRKPYLTVGKFSYDETIGISGFPAQIERLSPQFGDDSLTLRCEVSVGLSNPTTCSRPI

SEQ ID NO: 108421 - protein, 136 aa, Unknown
  Obtained from environmental sample
  misc_feature (1)..(136): Xaa is any amino acid
MPPPFLWEKKPPPIYFAPLFCVKGGGPAPPFFFFFWGEKKKKKREGPPPQRGVFFFFWGPPWGGKKRGVFFFKKRGEKKTPGRGAKKKKIFRGFFSSPGSSFKGFFFPGWSSGGGGGREKIKGGGFKKPKGPLFGI

SEQ ID NO: 108422 - protein, 152 aa, Unknown
  Obtained from environmental sample
  misc_feature (1)..(152): Xaa is any amino acid
MFFNSRNISRLHIDLVNDRHYFKIVFEGEVHIGQSLRLHALSSVNQKQSAFAGINRSAYLVTKIDVSGRVYQIENVLVAVFRRVGQGNRLALYRDAPLPLDIHIIEYLVLEVAVFDNVGFLNETVGEGRLAVIDVRYNAKITDKLGLCHVLL

SEQ ID NO: 108423 - protein, 109 aa, Unknown
  Obtained from environmental sample
  misc_feature (1)..(109): Xaa is any amino acid
MGAGAQRRRRPGHLQAHRPDRPRRLRQPRDHPARVRGSLRRPEQVRRRRGQVRRRRPPVLGRERLPRGHRLRRADQREIRYRLPLQGLHRHRQPILHHRFRRRNGRGAG

SEQ ID NO: 108424 - protein, 119 aa, Unknown
  Obtained from environmental sample
  misc_feature (1)..(119): Xaa is any amino acid
MRIIVFVRFLCGICREKAGVVAIFVKTERDKTLLCEFKFAGFWYQNFRWDFCLSTFASVEKMYGQILYLSSALRPSYLNAPTVILKRTHHICRKCKSRVSPQIFFVLFAQNRLRIVKAP

SEQ ID NO: 108425 - protein, 107 aa, Unknown
  Obtained from environmental sample
  misc_feature (1)..(107): Xaa is any amino acid
MDARLDGVVLRRQAESVPAHGVQDVVAVHTLVAADDVGGRIPLAMPHVEAGARRVREHVERVELGLRRVVRRLVEVGLTPAGLPLLLNVGRRVVGRVLTPVLILIIG

SEQ ID NO: 108426 - protein, 106 aa, Unknown
  Obtained from environmental sample
  misc_feature (1)..(106): Xaa is any amino acid
MEKDYFIFLDDYEFNRIRIFVFTKRGNVKDIMCQYESLMNDKWIAIIRYDCSHGQPFHRDVMMPNGEKEKQLVEIESLNEAFTYAVQDIKDRWRFYLNRYKSKIRS

SEQ ID NO: 108427 - protein, 136 aa, Unknown
  Obtained from environmental sample
  DOMAIN (40)...(97): Bacterial regulatory proteins, luxR family
  misc_feature (1)..(136): Xaa is any amino acid
MWEGNEEFQRGLRIVREGGQYISPKVQYLIDNRDEWPDTKNKMTRRRMECLIMLCNGCSIEQMCNMLNISPKTVDNHLNSLYFAYHVHNRIEMVALAYKLELMTSGDIHLYNKEKKRLPFPELAAVKRKRDRFYFD

SEQ ID NO: 108428 - protein, 186 aa, Unknown
  Obtained from environmental sample
  misc_feature (1)..(186): Xaa is any amino acid
MWILKEAPESNDRYGWHVGDIRDDNPALKKKGGTLRQICLISYAILHGCNYKEACKAKDEDLADARQKVAQINISKIKTSVGKFSAKDMTSEYNKWEYVLKEQIKAYEPEIIICGNTLQYFSNDSNYFGITKSKKIILESIFPNLQRKYCYYHVNKKLYINIHHPSDFNINWERCINEIVNHCCPV

SEQ ID NO: 108429 - protein, 302 aa, Unknown
  Obtained from environmental sample
  misc_feature (1)..(302): Xaa is any amino acid
MIAERHAADGNLQEYIKFQERWLAEAKQNRNEAAINLYENELKKANGLIGKKVEQKNGYLYEVDIPGDEELLDWDKKLKDQPEQVQKTAKELLTWETDSSENISKLWIHDVYTIQRYDDGYGLKNKGRGLNENKNSLERWKTLTEAQDAVNDHILRNYSGALFYGQLEDKYGSDRAASEYLNSLGIKGIRYLDGSSRATGEGSHNYVIFDDSDINITQTLFQLDDELVEYAAQYDTWQEFRDSVQTGEASDADNAWYKSLWGDARKIYNTLFQEGEEKATRAQMLDNSFIKEAERGIPDRGS

SEQ ID NO: 108430 - protein, 145 aa, Unknown
  Obtained from environmental sample
  misc_feature (1)..(145): Xaa is any amino acid
MRGAQEGDIRRPFALADRAGRAASQASCPARLHLADIQGFRRTARRQVLRGRQGAYRRLRQARYPEGHAGRAQQRQEHRGERQAQLRDGQARRLPKSAEAYASGREVQRAGGLLYRHLRSLPRLRRRAARAGRGHSEEPDGDGEA

SEQ ID NO: 108431 - protein, 118 aa, Unknown
  Obtained from environmental sample
  DOMAIN (43)...(113): Biotin-requiring enzyme
  misc_feature (1)..(118): Xaa is any amino acid
MTGFAGTKGFWAVDSECPKKNAFPPCAFDFVAIPFCSSVEKTMIVSAGWPGCVLDVLVSVGQEVDEDEQLMLLEETDDGRTQVFIHAAEAGRIVKVMGEEGDFVQEDDDLVEIAESGH

SEQ ID NO: 108432 - protein, 110 aa, Unknown
  Obtained from environmental sample
  SIGNAL (1)...(26)
  misc_feature (1)..(110): Xaa is any amino acid
MARVSRSARASSILMVSISDSGSILSLTWIISGLSKQRTTWAIIPTSRIWARNWFPSPSPFEEPFTSPAMSTNSTVAGMVFFGLKISLNLVSRESGTSAMPTFGFLVENW

SEQ ID NO: 108433 - protein, 221 aa, Unknown
  Obtained from environmental sample
  misc_feature (1)..(221): Xaa is any amino acid
MEQVKNQKSFFEVFPTLKLDDKCKLLLGEVEVTKISTNSTRDFLQVHMFSTHLIDKETIYLVEKKIKEQLFSYQPIQVKIIEKYQLSKQFTVKNLMVEYRESLLLEFKNESALLANIFSAAKISYGQGDQKGDVLQVEIENSIIAQGKASEIQTKLTEVLNQRFSLGAKVEMTYREAVEKPRQEAKVYERFAPKENLAEVVAANGRDEEKEVATGAVSSKG

SEQ ID NO: 108434 - protein, 283 aa, Unknown
  Obtained from environmental sample
  misc_feature (1)..(283): Xaa is any amino acid
MIIKINDKTLDFSLDNEKTLGEVFTSLEQWLSNSGHRLSEISIDGQAVSAGMVEDVFKKEVKSIKELNVSTNAVAELAAASLQTLLKDIDEYENIKFDEKAKFFDNWKNSAQALFIMEEMPDLYSYFKNTFLNGEIPVQTLRSVTEEIQREVNEPVKELVKIEPILNEICDKLINLPLDIQTGKDLTAAQTIQLFAAITEKIIRLFYQLSTQGYIVQIEEAKKIAEGFGNFKNILTELLESYEKHDIIIVGDVAEYEAAPKLKELYLSILNNCREEAKAQGDK

SEQ ID NO: 108435 - protein, 129 aa, Unknown
  Obtained from environmental sample
  misc_feature (1)..(129): Xaa is any amino acid
MIAYARGSRARSATEAVNGYNIRAASGDAARDGGNIMHRRDFNNDRLLIISRLFKGKDKLAQVFNGINVVVRRGRDRVGAFGDHPGTGNVAYDFSSGKMPAYAWFRALPHFDLDSRARVKVIGMNTETP

SEQ ID NO: 108436 - protein, 233 aa, Unknown
  Obtained from environmental sample
  misc_feature (1)..(233): Xaa is any amino acid
MRRAISFQSPNFHLSKTLAAELGLAAKGLLGNQRIGARAAGVHLVIHKVVEFEEINYPAKNRIHKTFTRPAVPEHGLARYGQTRLFEFFLNLLRGRGLENRRRVPFSQGRASPAKLGFQKLAYIHTGRNAQRGKANIKRGAVFHVGHIFLREYARNNTFVAVPSGHFVAFAEFTFGGDKHFHHFVNAGTKIVPFRPLESLYVNHRSLNAMRHSEGRITHFPGPFSPKYQIERV

SEQ ID NO: 108437 - protein, 183 aa, Unknown
  Obtained from environmental sample
  SIGNAL (1)...(26)
  misc_feature (1)..(183): Xaa is any amino acid
MKKGFFFFFKFPGGVFFFFPPPFFWGKEAPPFFSPFFKKGFFFLGAKLRGGGGKKKLFFFLKREKNFFSFLKNFGGETPKTGGPFFPPPFFFAFFKKNLLGGTFKSLRGPGFPVWGGAFFRFFLRVNVPRGGYGPLFSGKPRGVGPFMAATVGVPLYVCGAGTIPCLSHGLTAECLSVRLRHL

SEQ ID NO: 108438 - protein, 119 aa, Unknown
  Obtained from environmental sample
  misc_feature (1)..(119): Xaa is any amino acid
MLRRDPVDSGLWGAPVWRCCAAACLRVVGTSKLNNIPAAVFNDLFAGDIVGVAQPHFASGSEPVEFLGRILHKVVAFYVYHPRKRHLAAPRRFVFGIIQSVELLYLPFRVVFYHNLYWI

SEQ ID NO: 108439 - protein, 1176 aa, Unknown
  Obtained from environmental sample
  misc_feature (1)..(1176): Xaa is any amino acid
MMASRSRARRHANDAGYTRIANTGAMKDQFSVRSDDLISVKWSLGSTMTYWFDEQGVAHTTASDPWDGVFRDQVDNHHACATGLSGNAYTYAACAYVVEIPLMPTTNYKFGAGATYDYKKFVGNLDITANSITGGWSYQTEVNGVPMTLTDNNVLKLALTLPTMGDALAAATREINGALAGMRTEFEQWEMNKQTDAYAYVNGLITGAWGSNTNSSGVSAAITDAVWVKPDWSAPRDGSYGFKVTLRYGNRTEVLGPYLITVKHEQVPGGTSTGDVIHISGVKIGAIVGSTIQNATWEPGKVYGVDLPLVDVTDTRTWGPNSGFFVSQITFIPTDGALAMAWGTHTFSDDDGSRWANTKGSTAEGAVGVPYAGTYTVKIKMEAKLDSKAYPSAGYSKDVTLYVHQRDIKVAKIEVSLQKDELVYDGTPKDYTRIKVTDGSNTILYNDVVGVPRVPGTDVKIEDWRFDAVNTDSVTNAGRATFTLLGMNNYTGKVVGSFVIEPMTITFDETATYSWSKEFDGSTALNVLGGDPGIKFLDAFKQPLPLNHGAEEHYTVNLKYNSVTVGTDKTVEGTVDLTAKASNYKLKSKNFKTTKQTIVKGTPTAANIVTTPALSLEAPVDIKYDTRAHAVTASWAQGIPNNSGKITVIYSTDGGKAPVEMGDYTITADVEEGVNFKAATGIALGSIKISEALPPRIVQQPVADTFYYATGSVTLSVKAENPNGKTTGLKYQWYEVTDSGNVLLKGKTAATYVESRKSVGDFTFFVVVTYNAQDQATTSVTSEQARVNVRPEPVSLADAIVAVGRSYPYTGSKIEPDVNDITVTLGQLNLIAGTDFEIANNGIKHNGDAGAEAGILTVKGINAYKGNASGTFAVDPIQIALEHLSIGTSVMTKEYTGEKQDLDIKLKTGLRGAGAITYTYDPDTTDRVNVGEWNVTLHITDGTNFYGVEDLPLPDKYRIRRVSWTKEMFNIVGLDEQNRKDVAWTGEDQGIAKPTLLGVAQKYSGNYNIVYDRNGEYSLTAVDSSRLAYIIKIQIDGDVNFMKDEIEIGRLMINGKEWLPDAIAEGNREIPKGPAVEQVTVKPVVVNAGEVTVGPNPLSSGSVLSLYWNGSKAVNGKLAVYTTVGKKIAVINVSGTKKIGTWNTAGVPTGAYLVRGVLATKDGAKVKVSTVVGVTR

SEQ ID NO: 108440 - protein, 101 aa, Unknown
  Obtained from environmental sample
  misc_feature (1)..(101): Xaa is any amino acid
MFESSTFFTKWPSTNGPFFTERAIVYFDLRLTMYLPDGFLRSRVFRPLDFWPHGDTGCPPPEVLPSPPPIGWSTGFMATPRTVGRMPMWRLRPAEPIQTSI

SEQ ID NO: 108441 - protein, 236 aa, Unknown
  Obtained from environmental sample
  misc_feature (1)..(236): Xaa is any amino acid
MIETNISQAVNKLNAELQKAKYKILQAEAEGINAIAAEIQSGLTAEIEQSIHEPVKMTRESVKMWKARPEQAAKGYPIEAKVFIRDQAKGGTPPSKYLQALALGEQRQAKPFEVLLIKQGVLPSWGHLTAARKAPKDDFGNVPFKIVKDALEDLKVKQNRKSRRRSWTYVYMQPKGKSAGIWKRDDDARTIKPLFIFHEGKQPYKKIFEFFEKSQAIFENIAPEAMKVKIINVFKH

SEQ ID NO: 108442 - protein, 181 aa, Unknown
  Obtained from environmental sample
  misc_feature (1)..(181): Xaa is any amino acid
MAAVCYIMAEVLDRDPWILFDLRGKTQEDIMAALQSAAPQAQEQAPKKRGRPKKVASVQDIVTQKKGAAAPWQQISEEEYDSLLAPLPSIAIPRSISPDPSVFVQLGPLPHARIEASLCLAALMHRTAQVVQKQIEDGVGAIEDEGGDQEAPSPFESPLPLKVSHRTRRHWRQKKRRHYPA

SEQ ID NO: 108443 - protein, 169 aa, Unknown
  Obtained from environmental sample
  misc_feature (1)..(169): Xaa is any amino acid
MLKYFFSPXTRGSGAVLSAEGVEVVSSLWGCFSGRLRGYYFLFQFHNSADQMHDSFLHRVGNIFPSGVRFLSGLHYYPAGHTGDRGVVRHIFDDHGIGADFAIIADADIAQYFRPAADNRIGADSRMTFNPPGAGAAQRYTVIYETVVPDLGRFADDHAEAVVDKNTPA

SEQ ID NO: 108444 - protein, 146 aa, Unknown
  Obtained from environmental sample
  misc_feature (1)..(146): Xaa is any amino acid
MTATRERLMSVSIMPGMKENTRMLWLASSAARTRVNPLMAHLDTEYGPCPATGMTEVKEAALTITPPPWRIICRAASLLPTKAARTLTSMTLSHSSRDRSRKGFSTPTPALLYQMSRRPKRWTVALTKPSRATGSATSAAWQNTSA

SEQ ID NO: 108445 - protein, 198 aa, Unknown
  Obtained from environmental sample
  misc_feature (1)..(198): Xaa is any amino acid
MGVFCSIVYVISNIAIMWIEVTIFVASLVFSSVIVYILCFLWFGDTRNRRSVSFFCLGIFVIFWMLLNAISIISAEKFFPFIYTLRISFVSIIPFSVFWFILNFAHIRTYKYRFALPVICIFPALDILLIITNPLHHLVFPDYAYPVPARGPLFWVHTVVDFFVXLLCFIVLVRYVLKHARDEPLVLQPYLECPFLIF

SEQ ID NO: 108446 - protein, 392 aa, Unknown
  Obtained from environmental sample
  misc_feature (1)..(392): Xaa is any amino acid
MSHRPVLQYRPLDRGFLLCTTEPANGTVWTRILRGLPGDLYGRERLTPAKARMFLPDGGLVETHAVPLRWQRAFPWLASLPPTLNGNGNGGHARHDRSGHAGSRHAGGSLRFWATALRMLQSLIIRGALLPRLNTDANPWRAHWGVSLTSQSDRDLLEKLQKAMPPSAYAFPEDDSWVFTKGHPLGTMDLEVIQDCPTIPAKPGTLLKAFLEDGADFLVRFVAGALKPGDDARLALIHRLRSHKRDRLAWDDRLMVSLSHPLGEFPTIGVTERTLGEQLDQWSEGARTQWIRPSLALEAPLVPPGGMAIQDADKLSEEGWVLSVGLENLEGEKLSAARLFEEPLPEAETLEARKILLRGLARAVPFFPPIQGALSGQKPSDLKLLPIDAWAF

SEQ ID NO: 108447 - protein, 153 aa, Unknown
  Obtained from environmental sample
  misc_feature (1)..(153): Xaa is any amino acid
MPLNHGNRRRCFMAFFRCLRTAGGKGTANGVLAQNAYLAWNGGEPFFRVMAAETGRGGEQGPCVWVLRIVDNVVRWAQFHLHSSVHDHYPVRNFRNKVNVVAYEQDRNAAGTAKRFKQFNNLFLYGDIQCRGRFIGNEKLASLSQRQRDADPL

SEQ ID NO: 108448 - protein, 150 aa, Unknown
  Obtained from environmental sample
  misc_feature (1)..(150): Xaa is any amino acid
MASEDSSFFPYEGVLSKSRPLSARPTVKSLMERCSRIFSFVNALPLSSITVTPASTSCSARGKSRVIAKSPFSASSKRRLSAAPSPGGQSSKIAGLGIACFWPSTGSGSPGILRFAAKTLLIPSLAEKRSIISLAMRGHESASTRICISN

SEQ ID NO: 108449 - protein, 132 aa, Unknown
  Obtained from environmental sample
  misc_feature (1)..(132): Xaa is any amino acid
MSLITTLLPDNIAEIALAKVLALTPFQGIIGNVIFLTASFLGMTHVQTYDGLTRKSTARWVDHEILNGPPVSEHTGRSLKDMDFSITLCSTIHFDPLSTYETIEKMQDSGEPQLVFINGKNYGLYTVRSAEG

SEQ ID NO: 108450 - protein, 167 aa, Unknown
  Obtained from environmental sample
  misc_feature (1)..(167): Xaa is any amino acid
MGNFIIQIGSNNVSLIISGSGSXLGWSKFYEEIKSFVSVTIKITAISEITRCSLRYIDFLEQDATDVCNISLNNSIKYDRKQICNTEIYRNGDFNIKTTMATEVILENSIDGKKLKGSIIDTDVSLEMNLPETELPANINKMHDIAKEVFFLLLKPEYIAKLGPKYE

SEQ ID NO: 108451 - protein, 263 aa, Unknown
  Obtained from environmental sample
  misc_feature (1)..(263): Xaa is any amino acid
MPLGINSDVRWGLADFINHFYDTKSMDRDLWVNYIGDRYITMPGFKRGVQEMNKWYNEGLIFKDFPLMTTADDFYNQIKSGVVGALCQNWDFVYRTDINILVDLRKNVPDADFIPISITNNKEISDKAGLRIFIPQSSPNKDAALKYLNWLSKPENYNFLQVGQEGVNHRKVNGIPQIITMPPLHTWFMNSPNNIDMTLPMNGVELGSDEQNAKILALNYGTIPPDVISNAFVTSLKNARGPAVWQATTKINQYSGDLREKAG

SEQ ID NO: 108452 - protein, 260 aa, Unknown
  Obtained from environmental sample
  DOMAIN (1)...(222): Calcineurin-like phosphoesterase
  misc_feature (1)..(260): Xaa is any amino acid
MSILFSGDFHANALGELSSITQKTLIKKHGPEKYNNIKYHIILGDGGFLWPGNHENDQFNYKTLANRPFPVLCVIGNHEPILGMDNLPEKDIGIGETVYQINADPFFAYLKRGKVYTIDGFKFLVLGGALSIDKDNRKPNKSWWEKEYWTEQEKQDLFKLLESEKTFDCVISHTGPNHINKLLFTDPKYSSKLTDDEVARLNDQIAEVIQFRKWWCGHWHRDLYHDVPNENRGYYYLYKTTKILDRVNNEMVVYNEYNKR

SEQ ID NO: 108453 - protein, 182 aa, Unknown
  Obtained from environmental sample
  SIGNAL (1)...(74)
  misc_feature (1)..(182): Xaa is any amino acid
MSSAYAQSLSGDSKYLIWSSASLRRSWMSPNTLWRSSSSSRLTVIVSFLRCSCWMSCLASSSSIVFDCSSASLAPSSTAIAVTVPWSSAISCRACARSKVLTRSSVINLPMAAAWASSQLGAPPVSSCMSSPAPLFAAGSALSKLASQFSSMSKPMRASSVPSSAEAFLGTKALSSSTRVSA

SEQ ID NO: 108454 - protein, 121 aa, Unknown
  Obtained from environmental sample
  misc_feature (1)..(121): Xaa is any amino acid
MLGRCAVFGINMSSAVDAHPDDGVLDVYTFKETSKLKLMYNIPTYAHGNYRKLPDLVSHYTAKKIKLSSDEVMCMSVDGEHFYGTSMEYEIMPKAVNFVCPAEIDLAKLPRIYGKPEEGYR

SEQ ID NO: 108455 - protein, 164 aa, Unknown
  Obtained from environmental sample
  misc_feature (1)..(164): Xaa is any amino acid
MHPDPLQRRGFGDKRTRNGASPHIRRSGARGNVSGIRRRDAPAAAGRSDNRVGVERGRNSRDCDMRQHGRLRHGERSDKGLHSGRRPHSGQRRHGQQDRHLRRGYISRLPQDTLLRSRPLVYIRLKNQERRGHTYREAGQGRGGALGGRQEEYPRQSGSVQSVL

SEQ ID NO: 108456 - protein, 165 aa, Unknown
  Obtained from environmental sample
  misc_feature (1)..(165): Xaa is any amino acid
MAIKVASRTNWDNEGLVIEGLINEIYQPDTKAVIYFFSPDFEKREPQKIFTKAFPLAVCAGASMIGGWSSSGALESGITAMSLSADEVEQVYSSFQEGVKTDPAQAAKNAIADLKQQTKGENINPDEYLGLLFFDGLCLGELIVKEFSLEQNFNMAFVGGAAADE

SEQ ID NO: 108457 - protein, 224 aa, Unknown
  Obtained from environmental sample
  misc_feature (1)..(224): Xaa is any amino acid
MTLPSEYYAKSLYPLQDGVLSVVENCKTHFYLTGGTALSRAYYQHRYSDDLDFFVNADAHYREQVDLIITKLAEAGFRWDAENFLRRPDYTTFKVQWTKTDAVLKLDFINDISEHFGGFKETKLFAKTDSARNILSNKLGALFRYESKDVADIREIALRETVNWAEIIREARAKENGLEIPVICEILKGIPEAEFKRIKWQKETLWAEFQRDIDKVGFDLLSLA

SEQ ID NO: 108458 - protein, 214 aa, Unknown
  Obtained from environmental sample
  misc_feature (1)..(214): Xaa is any amino acid
MSLISSQVTKGGIVMCADRCASAITVNAVDLPGRIAFSHNAEKIHVTKNNIGISSMGAGFVNKVPLEHVMYGFLDGLDIKAYKTPSDVSHALKAYLRQLSPAGVDACFHIGGYDKDGKPALYLFDALRGVIRQDNVPNTYSAAIFAAPDPFTEQIFHRVGKAYDKINLRSAIDFAKFVNVTTAEIMRFAGAGEAVSKECDILVIHPDHSEWIXG

SEQ ID NO: 108459 - protein, 220 aa, Unknown
  Obtained from environmental sample
  misc_feature (1)..(220): Xaa is any amino acid
MDFHFSGKSGDGKPIKLKREFQQIVARENNYSKAPDMTDYFISDIELATKLTQYKNVRFDMLALKWPTALPDPNNVLVKLALVEMKYGSNSLTGDSSILKHFDDMKSFLSNKAHSDDLIQTAKKQIDQLKNFGLVKHKFGASKFAIDPDHFEIIFILANHGPQKKAELLTELEEIKKKWKMPESNNLDLRFFTANSAGYGMYDACMMDIDNYIELLKGQQ

SEQ ID NO: 108460 - protein, 234 aa, Unknown
  Obtained from environmental sample
  misc_feature (1)..(234): Xaa is any amino acid
MHHGRHDDLPHAVGNQVFTDNTAAGSAHGPGGHDKLLFFQHEYLTSDDAAHAHPIQQAEHDENGNNAVAHAAQVMHDGILTAVDPPSERFFDDGAQQQHHEHFRYGVDDIHNPHHDKIHPASEIPRRRPVQRADHQNDQRGEHTDDQGNTGTIHHPRHDIPPSIIRAEHMWEHGFLRGDAFPFLFGIRHHFQVSGATDLTLIGIWHENRPHKGEQQDKHQYAKGRQDTQYSCRI

SEQ ID NO: 108461 - protein, 128 aa, Unknown
  Obtained from environmental sample
  SIGNAL (1)...(70)
  misc_feature (1)..(128): Xaa is any amino acid
MVMSGAVIMMIVVMAVMIVISIMMIIIVMMIAAVMTVMVMIVIMEMIIAVMMFVNMVMIIAFDMPINTNNHPRPRNPAFHSRLDTNFNPRYSSVVQPFQKINAGIIIKQFQQSCRHHVASRTHAALKV

SEQ ID NO: 108462 - protein, 101 aa, Unknown
  Obtained from environmental sample
  DOMAIN (4)...(96): Plasmid stabilisation system protein
  misc_feature (1)..(101): Xaa is any amino acid
MIDIVYLPSFQQDIDSITNYIAYTLEAPKAASNLLDELEKSIKDLKMFPLAHRLYRPIKPLLTEYRVLTVKNYLVFYVVLEKTIEIHRIIYKKRNLSQLIK

SEQ ID NO: 108463 - protein, 110 aa, Unknown
  Obtained from environmental sample
  DOMAIN (33)...(100): DHHA1 domain
  misc_feature (1)..(110): Xaa is any amino acid
MKIYDELAFLRLKNVNDSLLGAAGDIVISVAGVNIVVSYAVKERGIKLSVRSACGKIKANDLVRFLVEGYGVGGGHDNMAGGFIPAENLSQSRVLDTFIKHRAIEFYEKA

SEQ ID NO: 108464 - protein, 240 aa, Unknown
  Obtained from environmental sample
  misc_feature (1)..(240): Xaa is any amino acid
MGVNIAFTQNIGVDHAAAAKFHPAGAFARGTALAAAMDTTCVKVEAGFDEGIVTWAQADADTAGFLHMACRRATRRLSHMPAILPAVKHSVQNLGHEIHQGCDRDVFPDHDAFALEEGVFVGCVRGLVAKAAAGADCAKCWTVFFKHIVLPHRGVGAQDPSVGEPKGVLHITRGVVFRDVDAFKVFVFGGDFAAVFDYEAHACKDLFDITDDKGYWVEASGGVGVGRARGADAVXGGDVY

SEQ ID NO: 108465 - protein, 245 aa, Unknown
  Obtained from environmental sample
  misc_feature (1)..(245): Xaa is any amino acid
MEAFKFKEGYAGGAGECVSFAALYASAAFAVADIPLDKIFLLATPLHSQNFLDIGEGVLTNNRRIVTKNMWYNGTELSAKARRALENETVTIVAHNTGCIHTVFPAASIDRARYGQIKDKLMKFLSTDITYEILANFLRHKSGLQRYFQISYNRHGKTLYIEAEKVYSYEHSSKLRVGDDTQENLLQDIEDDEFYTGLWSHRFDLGKLXSFLGGNKISIDSVDRIDKLKRNLPTARSAVRTLSTS

SEQ ID NO: 108466 - protein, 211 aa, Unknown
  Obtained from environmental sample
  misc_feature (1)..(211): Xaa is any amino acid
MPERLWKNYTALNNFLRLLNNFLRRRNIFLRLLNNFLRLLNIFPRRRNNFLRLLNNISRRQNNISRRQNNILRRQNIFLRRQNNVLAPAKYILRRQNNISRRQNNVPTPAKYILRRQNIFPRLRNNLFCRRDNLFCRQNIFFCRQNIFPRRRKYPVSYPKTGTDYIVQCSDNGLNPSPSTSCASSTETNAVWSISLMYDSRTGNSRRLTFV

SEQ ID NO: 108467 - protein, 287 aa, Unknown
  Obtained from environmental sample
  misc_feature (1)..(287): Xaa is any amino acid
MLNARPQKHTAQELRFLYGRRAHQTRAAQLVHRLYVLNDGVVLLAVGLVYLVVVVHPLKRPIGGYGHHVELVYLVELRGLRYGGTGHSGELVVHLEEILEGDCGQRLILTGYLNPLFRLQRLVEPLAVAAAVQYAARELVHYEYLPVLHHVVDILLEKRIGAQQLTDAVDALRNLRVLAVRRLLTLRLLLYGERLVVIYLAERHGQVGHREELRVVSAHKRPPLLRKIGAVARLVYSVVQLLVDLVQLLVAQELRLHHLHVLRGALLLYELHETLVPRRALVHDHEL

SEQ ID NO: 108468 - protein, 155 aa, Unknown
  Obtained from environmental sample
  misc_feature (1)..(155): Xaa is any amino acid
MRENKPIIVSINFLSELFPVDCVSMGNAKRYSQFFHKIYGDGVNVKIICTSNITEAGRKIDFSVNYSSLLADDPVIRDNPLVMFLRLLKNIGTREIWLAGFDGYTQDNTVNYYGDYLRLLYCQDDVILRNEAIKKELNDISQFLRISFLTPTRYI

SEQ ID NO: 108469 - protein, 155 aa, Unknown
  Obtained from environmental sample
  DOMAIN (11)...(151): Redoxin
  misc_feature (1)..(155): Xaa is any amino acid
MTDRPRTTDGFTGKQQLVMDFSISLTGIKDSNMPFSVFSSRPLMIYYFSPHCPHCKKSYNGIQQVAKEYEQRGLTSIAIAVNGVGKREIMMFMEEHNASIPFFQDNGDFAKKYGDGYVPRLYLVFSDGKIVRHSNLENDLKEVKLDIEKLLGIKK

SEQ ID NO: 108470 - protein, 160 aa, Unknown
  Obtained from environmental sample
  SIGNAL (1)...(21)
  misc_feature (1)..(160): Xaa is any amino acid
MRFFTTSLIIAVALFSVSCQSLSVRRGQVLEILDSDSGKVYGRWPLEENGEFAIEFIHSVHQSPVREFYSVENGMIRLRAARFFSFGAGMQSDLEGDLTMSRDGDAMVVSGYRTSFKELNYIVGTAFDHLLFIFDGNNNETVKLRQLCGKNAHINIHLKE

SEQ ID NO: 108471 - protein, 117 aa, Unknown
  Obtained from environmental sample
  misc_feature (1)..(117): Xaa is any amino acid
MARSSVYCRVRAFFGSVRIRRKSSFPSESSSTRSGKRPCNSGIKSEGLLTVKAPAAIKSMWSVLTGPHLVVTVAPSTMGSISRCTPSRETSGPPPRSPLTAILSISSIKIMPVSSTR

SEQ ID NO: 108472 - protein, 304 aa, Unknown
  Obtained from environmental sample
  misc_feature (1)..(304): Xaa is any amino acid
MIDWPREKCVITMEDIEIKRYKKLNSAQLKIIHELYNNSFDLLKISKDNFDDKLLGNEYKKIYFLAETKNEVIGYLIIVNNSIVLLIVDELYRNNGIGSRLLTNGELEIREKYDQINLVAPDFFLCGCPFDTKSSYHKWFEKRGFIYEWTPLDMIVNLEDFEYRNEDHTCSLEGVVFKKLDKESDELVSCCNGANSVEEGWGNYYCYDDNEGIIAVKDNEVIGGALIIESVLFDMSLKDTGSFGAIWVLPKYEKKGIGMTLYQKGLFALKNKGCKFCHIYYTYKPLELWYGKLRAKNILNTGLK

SEQ ID NO: 108473 - protein, 135 aa, Unknown
  Obtained from environmental sample
  misc_feature (1)..(135): Xaa is any amino acid
MPEKSVSCPYGEALLAFHSTQRSPCLPAASPGPLPAAMRGLKAAWSPRLSRRDRCRGKARRCPPGPPRQGRRRTPRGPARPRPNGRVPPCQRESPPPQAGTSCRRPGGANPFQCRFFARSPGPCRLPPPPCLPCR

SEQ ID NO: 108474 - protein, 105 aa, Unknown
  Obtained from environmental sample
  misc_feature (1)..(105): Xaa is any amino acid
MYLWLCPLYNYWMPSFRLTDKEKQEDGRYKKVYEKEPKTPYERLMESPDVSPECKAELERRRAGQNPVELNRKLNEAVGLLLKINREKLYLGKTSCQGDGQAPAA

SEQ ID NO: 108475 - protein, 189 aa, Unknown
  Obtained from environmental sample
  misc_feature (1)..(189): Xaa is any amino acid
MSMAMRYLATVRRAMLTVRCSFRISPMRSSDKGSRGSSSPMHLRIKALTLSEPTWLPSSSSKALLKKNFNSYTPWAVAMYLLVVMRLTVDSCMLMSSAISFRIRGLSLLTPSSKNSRWHLTMLSTTLRRVRWRWNRLLISQEAARCFSRKYSFSCSVAPAALSYRALSCKCGSPSSLSRMTNSPSCLYT

SEQ ID NO: 108476 - protein, 185 aa, Unknown
  Obtained from environmental sample
  misc_feature (1)..(185): Xaa is any amino acid
MRLEQRPEKERPADERGDDADGQLGRRQDDPRAQVAQRQKTAAREKGGGQQESVAPAEAQAADVRDHHAHETDGAGQGNDRSDHDGSNGEQQDFRAAHGNPPAGRPFLAGDQQIDFRRKAQDGEASRDRHEKQVRKARCLNAGQRPHEPVHDPQGVVGTAQVLDEHHETGTEXIDDDPREEHHRR

SEQ ID NO: 108477 - protein, 314 aa, Unknown
  Obtained from environmental sample
  misc_feature (1)..(314): Xaa is any amino acid
MPFFQFRVSRINDNIFFVVQHGTEGRHCHIKKQSHAAGNRAVIPNMRNRSRQFYVAHAFAAHLKMGNLDAATVAGNPFVAYRLEFTAITFPFLCCPENPFAEEAVFFRTKRPVVYGFRFLYFSVRPVPDHLRGSQPNHYRIKILYVPHYTLSCLEITLRFRNKLFVFFGKGNLFAVVVKNRKIKRKPPQFLHQYVKRFRNARRGGRFSLYNGLVNFGTPCHVVRLDRQQFLKRMRRAVSFQSPDFHLAKALAAELGLAAKRLLGNQRVGAGAAGVHFIIHKMVEFKEVNHPAENRVYKIFAGPAVAEHGLACHG

SEQ ID NO: 108478 - protein, 238 aa, Unknown
  Obtained from environmental sample
  misc_feature (1)..(238): Xaa is any amino acid
MLQCKVYDKTKKSKQWPPTGRRPTRNRRIHGRALPNAGKWRWYLAMRGQRQLTVDFHRHRPGHRVNPLVLGVAGVAPDPGGLDPVGFQQRVQLAPQVVVKRRLAVRLAPSPGLPVRQPRPDALHHVLAVTVNLDVARLFEGPQALDGPPQLHPVVGGRRLRAAALFFAHAVRRPEPEQEGPAPWPGVPQAGAVAKQFDLRPRTHAAKPPQVPRPLPGALLAAVPVEHGHTVPCLLRVV

SEQ ID NO: 108479 - protein, 323 aa, Unknown
  Obtained from environmental sample
  misc_feature (1)..(323): Xaa is any amino acid
MPKRILFNPVLDDNSMYIQGLKFFNKAKQMGILDPDSATQTFSDVVEKYADGRVYWSIFSWLGPSNYNTSERLNQGKGMFAVAAADQKNIVYGQSIYGKERIWSIGSKAKKPERIMELINWLCTPEGVMTNSWGPKGVTWDYDSNNKAYLTPLGIEIQDGNKRAQMPESAGGGQYADGENKMNNTTFNPNDINPVTGERYNKDFWSSELNRMSNPAKKAWQDAMGVMTEDEYLEKGNFKALVVASDYVSPKRNDELEQKYVQVSNAIKNASWRAIYAENDAEXDRIVREMISQGKAFGYDECLAWDQEQGRVRAAAVRRALGN

SEQ ID NO: 108480 - protein, 144 aa, Unknown
  Obtained from environmental sample
  misc_feature (1)..(144): Xaa is any amino acid
MLFNNLSFILEYREKTMNKINYLEMLPINSIAKYAKGHPSDGIPFTGYPRTHPSEKNKLILVYDPLGNEPIVLEFKLDDILFVEEVPSAVTEAGEGVPLVKLWVQRGAVGMILEPFEVNDLAQAVGKARAVKERILQNQPQAGA

SEQ ID NO: 108481 - protein, 108 aa, Unknown
  Obtained from environmental sample
  misc_feature (1)..(108): Xaa is any amino acid
MESDSDAIKSIPEKYRSEEFWRIAISNCGYWLKKLPASLISEEFCRLAVASRGTVLEYVPNKFKTKELCFEAVRQDGHALMFVDVSKLTKEEYTEICRLALEGRGKEG

SEQ ID NO: 108482 - protein, 274 aa, Unknown
  Obtained from environmental sample
  misc_feature (1)..(274): Xaa is any amino acid
MGGGTTIAVADKLNRKWLGIDQSPAAVKVTEFRLQGQTDLFTAPYAVQLHKYDYDTLRYKDAFEFESWIITQFGGVPQNKKGGDKGIDGKWSDGAPIQVKRSDNVPRDVIDKFPTAVQRYDKNLFEKNKMAEKPVGYIIAFSFGKGAIGEVARLKNEENIIIKLVRVDEIVEVAVKPVITVNINELDRDAKGVRKIEFTAHGESGAGIEFYSWDFDHNKERGFKASVIMDKEGRQVIPLKAGTHNIAVKVVDNDGLENIEVVRLRINGGVERES

SEQ ID NO: 108483 - protein, 134 aa, Unknown
  Obtained from environmental sample
  misc_feature (1)..(134): Xaa is any amino acid
MLDIADCPLAQIDCSWNINKVGTHKHNVGGLHRHVRPASYGDSDVRLCQRRSVVYAVPDHCYFTPFTLQFLYLGGFVLRQDFRKHTVNPHLSCYGVRGFFIVPGDHGDFDSHFMKALNGRLAGRFQHIGDGHNT

SEQ ID NO: 108484 - protein, 299 aa, Unknown
  Obtained from environmental sample
  SIGNAL (1)...(23)
  misc_feature (1)..(299): Xaa is any amino acid
MIRVSTSTTAPASASAWQTGATATTFTNLNAEEGYYVYARSKVSEFYATGTPIRSDIIETARPVIRFETFNNGTLPEITKTSGTLLRRTEIETPERAGFTVEAWYTDSACTIPYNFSAPVTKSLTLYAGWLNDAHVATMGNKKNHMVWIPGGWFQQGSVAGTDANRISQRENQFWSGVKGFWMSKYEVTLGEYYDIMGYTHHQHYGAILDGNTNNPIPNTLAYPYTASTSFPLTQAQEEANLACELPVDNVNWYAAIAYCNQRSLNENLEPVYEIEYSTGLWSVRPNQXXIIPTSNDLR

SEQ ID NO: 108485 - protein, 232 aa, Unknown
  Obtained from environmental sample
  misc_feature (1)..(232): Xaa is any amino acid
MVEVGLGGDPAQQPRRDDGIGHRRIGGQRLRRIRHRISEQRSDLVAVQHPPGSAVARAGVEHGHGAPVGVRVVRDDQIGLDLCRERQRHVDRAGFLGIGERDGGEGRVRVQLLGDWEHVLEAGVVEDSSQDLSAHAVHRGGDDAQVARVVVGKPMDRVDVLIDDLFAELQIPGLRHRDGFGGRRCGDFVGDEAVIRRHDLGALPRAAHHAAAEIDLVPVVXXXXXXXXXXAS

SEQ ID NO: 108486 - protein, 263 aa, Unknown
  Obtained from environmental sample
  misc_feature (1)..(263): Xaa is any amino acid
MRRLYFWQSAGFSCKLAANCFNMVHIDMGVRQKADKLALAQARFFREEVQEAGVACDVKWQPKGDVNRALVPQEIQFSVDDRYLKTVMAGGQGHAGKVQGIPRAYYHAAAAGIILKRFHKQAELIHALPFRFRVMRYITSPEIPPLPAVNRPKLAFRLHSGLRFAVIRVWYHVARAPFVPDMVVPFLQPFLVRDAPDKKLQFRGNQPEGDFFGGKQGETVRHVMLKHCPGNGQSVNAGAVWLAKTLRENFFHYIKVGFHAKVS

SEQ ID NO: 108487 - protein, 202 aa, Unknown
  Obtained from environmental sample
  misc_feature (1)..(202): Xaa is any amino acid
MVGRPHAAPPAAPHGDHIRDQRGLPATGLLQIPRRHRQTAPYVAYRRGRRXAGAYGLPRHRREPLRKRRQRAALGAFEQRACQGLLRDVAGTFQQQDQRHNPAPLALQGQPRPAQPHHEQDRRRLGDRPLRAQEAGKARLRQGVPQGLGRREARRQEGLRRQNLQVGGHRDRPEHDVRRAGQEDARVQAPALKRAPLHSPIQ

SEQ ID NO: 108488 - protein, 248 aa, Unknown
  Obtained from environmental sample
  misc_feature (1)..(248): Xaa is any amino acid
MRNTPLLLVRFPGDRATRWLRTVLELGIGVPVVFFGTGAGLRDRLGLMRITIPVEKEIIWFLVSRSDAELVEKNIIPRANLDVPGNGFLYRCFVHAPVVNLRLRQGERLHAATMEQVIAVLDEVRGSSDWRRFGSRKHEHRSGEKKSINTRGLFFIGDEEEIDLFRKVAIENGARGATFNPVEMRSYSALTHEKAMKSNSRQLCDIIATQEIEEKICASTVQNGLFNEGKTCVLKSFNVEMPSIIRKK

SEQ ID NO: 108489 - protein, 193 aa, Unknown
  Obtained from environmental sample
  misc_feature (1)..(193): Xaa is any amino acid
MAKPETLKRVLVKHNVDKDIINTINNGYENVTNKSAKKKKAQYLFHAVNEMDKSLDKDTCKKIMEECACTIGSSLEKKVRQVAEKINSLSLKDKIKKVAEIKHLGEPILRKDGTILVNLANTNENGKFVCPCPQVSGIDIEKPKTHTYCLCCGGHLKIQYEIALGKKLDVKVQSSPFESNGKKPCVFLITIIE

SEQ ID NO: 108490 - protein, 233 aa, Unknown
  Obtained from environmental sample
  misc_feature (1)..(233): Xaa is any amino acid
MKFVVEFLDHSLYSINQHSVAVAEKAVSFSYGISVTFQNHLSSGKRRHKHKKRGFGGVKICKESVRNFKFVTGINKNRGASLSRGNFPFAPRAFQSTRACCPYRDNFPSRFFCPIYFLRGIFIYAERFAVHGMIFNVFASYGVKCPHPDMKRYKNALYSVCGKIIKDFPGKMQARRRRRGRTCFLSVNCLITVGVGRGVFAFYVRRQRNMPVLFQPVLGNRIFKFKYSELSFC

SEQ ID NO: 108491 - protein, 110 aa, Unknown
  Obtained from environmental sample
  DOMAIN (48)...(105): Bacterial regulatory proteins, luxR family
  misc_feature (1)..(110): Xaa is any amino acid
MLILNLFIFYLYIKLITGYQAKILAIELDDTPPVYSPANGLSETFIKKYDLSKRQVEVTVALLQGKSNKEIAKALDIEVNTVQVHLQNVYRKTGSPGRYALMALIGQGSN

SEQ ID NO: 108492 - protein, 99 aa, Unknown
  Obtained from environmental sample
  DOMAIN (26)...(83): Bacterial regulatory proteins, luxR family
  misc_feature (1)..(99): Xaa is any amino acid
MFEGRKQIQEDILLGIRNYDRLPAIPPHLTHQEIEIVRCMAWEKTVKETAYCLKVSVRTINNHLGNIYRKFGIHNMVGVLKLAVTQGILPVDELRSYRF

SEQ ID NO: 108493 - protein, 154 aa, Unknown
  Obtained from environmental sample
  misc_feature (1)..(154): Xaa is any amino acid
MIYDHRAFQSGIGYNLTKRFFQCATDDVYADGFLFVFAFNFAERFDGTNVGHTATRDNAFFDGCASGVQSIVETVFLFFHFHFRSSANVNYGNASGEFRQAFLQFFAVVVRGGFFNLRLDLPHASFDIGFLTFTVDNRGIFFIYRDFFGLTEHG

SEQ ID NO: 108494 - protein, 126 aa, Unknown
  Obtained from environmental sample
  misc_feature (1)..(126): Xaa is any amino acid
MTCPTNQPKSATLPDLYSASCEGEFFITSSAAASIAPVSVICLRPLASTIARAPLPSSNMATSTSFAILPLIVSSFMREISSAKPSGATGLSVIPKLRLPRCAKSSDRIQFAAIFPSPHACATRSK

SEQ ID NO: 108495 - protein, 151 aa, Unknown
  Obtained from environmental sample
  SIGNAL (1)...(20)
  misc_feature (1)..(151): Xaa is any amino acid
MLITSPGAVSAFLTGSELFADDAALALKPVAMTVTLISSPSSGSTNWPKIISTLGTAFALIVIMISLTSSIETSSGPEMLTRSRVAPSMPVSSRRGLSMAASAAALARLSPLPIPIPMWASPCPFIVVCTSAKSIFINPVLVIRSVMACTA

SEQ ID NO: 108496 - protein, 226 aa, Unknown
  Obtained from environmental sample
  misc_feature (1)..(226): Xaa is any amino acid
MMAGIHSHGNIISDIDDALKEIREFSKAKDVNIKDFILVGHSAGGQIALLYGYKYFQKNEHIKIAACISLAGPTDFTDDTGWSSMTMWGNDEEERLSFLSWMGTRLTCHPITLKQRNWTKQADYNEFEKYIMDISPIAHVSKEGKIPPTLLVHARNDDQVPYSNAIRLKEILEKASVPHKLITPGGSGDSHMLGGIVYNENEPIKFFGQAWVKEAKEWMEAYLRRD

SEQ ID NO: 108497 - protein, 154 aa, Unknown
  Obtained from environmental sample
  misc_feature (1)..(154): Xaa is any amino acid
MHRCRYRHPAVINGGGAHPDYPNGGVPICICAIAELAILIPSPRPEAAIGLDGERVEDTRRHGRPIIVRAHTDRGVPICICAIAELAAIITSPCPEGAIGLDGYRVSVTLRHCRPVIVRAHTDGGGSVCSCPVAELAVFIRSPCPERAIFLEGK

SEQ ID NO: 108498 - protein, 296 aa, Unknown
  Obtained from environmental sample
  misc_feature (1)..(296): Xaa is any amino acid
MSYSGSGSIQQADGINVASWTSFPITNNSNYAPATFVGAEIPQNEPSTLVILMSGVVKNIDFSKFSLTGTSAHPSGVVSPTGGNAGATVQLRLDEPVDASETGIRIGMASGGMVDNANQSVSPFSNQQVTNNSAHTAIGVFASEVPSGNPATLKVVMEGAVTISGGTSGSGSPTGWSITGRSLSITSWAISDGTITFNLSDSILQGDSISISYNGSDSTFRAVATGDRIPAFSVNVANNSTDTGGVPPGSSPRNLAITILGHEVTDASDVTAIIDLVSQTIRNGNINNLVVGARPI

SEQ ID NO: 108499 - protein, 157 aa, Unknown
  Obtained from environmental sample
  SIGNAL (1)...(34)
  misc_feature (1)..(157): Xaa is any amino acid
MKITKKLKFLKKINPFRANIILIILGISISLYFTVTSIYWRRFDVFNFLVSLTGVLFIILSFKISPIINKVKKWPKLIRYFLIIIFVCFVFSFVIFQSLILFNMRNTSKAGADYVIVLGCQVVGEYASLPLLSRGYTAVRYWKKILKQKLCKRPRPI

SEQ ID NO: 108500 - protein, 257 aa, Unknown
  Obtained from environmental sample
  misc_feature (1)..(257): Xaa is any amino acid
MMGEARCKHLARAQEKQALHGGMVQEMEKRGAIAQHGHPSASRLYADVAHADSYQRDTHVLDAVVREQTLEFALSQGSENAPKPRAYARADKRPAPPDGTRAEKAQAARQTVNAGMDHRPGQHCGNVAGRGGMRLGQPDVEGDDSCFGPESHQGQRKKHGSRTQGECGQGEGLKGGATCLRPQQAEHGDQEYRPQMRGDQINPGCLPHPRVMVMEGDQEEGRERHQLPGQQKEYGIARDQHQGQGQDQQVVKGPVRA

SEQ ID NO: 108501 - protein, 186 aa, Unknown
  Obtained from environmental sample
  SIGNAL (1)...(61)
  misc_feature (1)..(186): Xaa is any amino acid
MKKSNFKQNKMKIFKMLGLYALICILEFALLSFFIHIRLFSGVLYFFRLFIYAILSGSLLLGGFIALHRFDMELIISGVIISILMVFFFVSIFLAVIDRSYTVFSLNYLEQHREDTFTMEELEENFIKNYVIGLDAIPRRINEQLQIGNIEKVKDGYKISEKGIRLIKLFRFMEKIFPIEEKRILY

SEQ ID NO: 108502 - protein, 271 aa, Unknown
  Obtained from environmental sample
  misc_feature (1)..(271): Xaa is any amino acid
MPLCCATGLSEMFGIQFRPEYYQWGDLLRGLESGEVDFTGELMYTFEGKAGYLMSSPTINRTIKYYRLNDSTSLTDIIRARPPRYAFLREAVVADDIRANTDYHFETILVDSHREAYQMLKGGQVDAFFGLDTAEGAFDVYGDVRSEEFFPLIFRSSCLSACNEEYRPIINVLDKAMTERVLEYLTSLQKNGYQQYQENRIYTLLTKEERAFIKNNPYIPVVAEFSNYPISFYNKQENKWEGIFFEVLDQVSKLTGLQFELRNDDTVPLLK

SEQ ID NO: 108503 - protein, 228 aa, Unknown
  Obtained from environmental sample
  misc_feature (1)..(228): Xaa is any amino acid
MQKAEHKADNGLVHMMQTTTPKCLMISFDFSKEKDGYPRLSYPIASILAQFKGSGLIDIEHRSYDMREYASDMSEASRLYSPLWVAYEIIERVRNEIGNDIHAYSFICFAVYAWSENFIKSLLEAIRHEDKYAGKIILGGYDITSYTDEELQNKYPEADYYIKGYAEKSLELIFTGAAQHKILAVPVSGDELQSPYLSKILPLNTDKIYFETKRGCPFHCDFLSGQWI

SEQ ID NO: 108504 - protein, 169 aa, Unknown
  Obtained from environmental sample
  misc_feature (1)..(169): Xaa is any amino acid
MKTALDKSKGPRRAGDHSGIPRKPRTPHTACRHQGSCKPSHYNSVFPLSLARSSFIFFRNSINDFFNSGYFTARISQARYAAFAALSMPTVATGICLGICTMESRASSPPSPAEPIGTPITGISVWLAMTPGRCAASPAPAIITSVPSVSRTPRISASSSGLRCAETXI

SEQ ID NO: 108505 - protein, 137 aa, Unknown
  Obtained from environmental sample
  misc_feature (1)..(137): Xaa is any amino acid
MTDLPHEAKPIRTMFTPRPPQNAPRDKPKHPPSSNRPVPPPPSSPNAPETSPCPAVVPTLAAERLTDATPFSILPRAQTVLISSVSHPATWRLAAPAWSAPTPQYLYHRVPPPSPSGSAGRGRRRLSRCRRRPCREA

SEQ ID NO: 108506 - protein, 154 aa, Unknown
  Obtained from environmental sample
  misc_feature (1)..(154): Xaa is any amino acid
MLHRCLEHLTESTVNLVVSEFRNAKLDEFLTSLRATQKIRIAKDYQVSKILKSAIRNKEILAVMADQSKGKSENFKILGDSVPLFLDLPLTANNLGASLVLFITFRKNNEHIIRFERVYAPKSEIDKREIAKTLENWILKHPEQWAWNYGFIKR

SEQ ID NO: 108507 - protein, 143 aa, Unknown
  Obtained from environmental sample
  misc_feature (1)..(143): Xaa is any amino acid
MARFPQDRQTIHLRHVLRHHVAPCGCIAIRSYLCWGTEELGAVRGDAGDHTRRLPRNVRGPRPAQLPALQDTRRKEQPLQHAAHIRHLHPPQRPCLQQVHRRPKGHRGQQPQKGRTALRLHRQARQLLQALRHRKIRPLADEH

SEQ ID NO: 108508 - protein, 225 aa, Unknown
  Obtained from environmental sample
  misc_feature (1)..(225): Xaa is any amino acid
MFDEEDGQVFPFADKADQIVQGFGFSDVQAGGRLVQQQKTRSGGQGPDYLQASLVAIGQIFGQVVGRRAQAVFLQEPHAEFSHGPFFGLGLAGAHQGPPETGLHFRVAADEHVFQHGEVVEKADVLKSPGQAQVRDLVRPEVVQGRRKRRFARALGPAEADQAPGGPINSGEAVEQGGLAGPVGPDERCAVPLVYAERGPVKQHSIAVLLGDAFKRNHVSSLFYG

SEQ ID NO: 108509 - protein, 156 aa, Unknown
  Obtained from environmental sample
  misc_feature (1)..(156): Xaa is any amino acid
MEPKHLLAKSWKGEVNQPPTIGWLTKCVLDCADRLLCLRCGDAIKAMGLPQSARVLLERVVRFSAWLHDIGKCASTFQEAVEKKKAQPFRHETVSWYIITQILDDFLATYTPDKTERWMIAACVAGHHRKFYFEDGIIDDVSGGCELYLRHRDFRA

SEQ ID NO: 108510 - protein, 123 aa, Unknown
  Obtained from environmental sample
  misc_feature (1)..(123): Xaa is any amino acid
MLCAGQRLAAGVRGLVCLRGDARPITGDQRGKGGHGVGETHGPPDLRRRGLRQDGGRHAGGVQGGHVRLPSGGACAHDHPCRPALRHILGAHVKFSGAHRGAEPLSKGERGQDDGGKTRVRRG

SEQ ID NO: 108511 - protein, 135 aa, Unknown
  Obtained from environmental sample
  misc_feature (1)..(135): Xaa is any amino acid
MLKDQRKNSPEYFNLDVKGLKVSDGSFEALYGQKLLPNKYEAGLIDVNSTLGDIKNTEVGKKLIAIIIQQISAAFGGEGSSDLRVMFEKMLMEMPLRSLAMFSGGRLTPSMVEALVDMLNGKPCSDPGLAAFYKG

SEQ ID NO: 108512 - protein, 177 aa, Unknown
  Obtained from environmental sample
  misc_feature (1)..(177): Xaa is any amino acid
MVVQLDLRGRGDEEEERRGQSGACPGLLRQGAFRQGAPLLVAGDKRRPHDVERRAAKSVVGSGTAVARRGGGRRHIRRQLQGDSRPLPAVNRGARRAQPLRRARLALARELSGELHRGRGQPDLRRQGRGAHRVRGELLRRRAVRRAGPRRERTLPGSGKTRGGAQAQDSGRRHQFK

SEQ ID NO: 108513 - protein, 192 aa, Unknown
  Obtained from environmental sample
  misc_feature (1)..(192): Xaa is any amino acid
MHCILISFTKDRPLRGGADLRGVAGKVTGGLLGKRLPVFPPLLNFFIAYLYVYGKTVNVDGNDVALVDNTDVPAGRGFRRNVADRRALGCAGETPVRDQGDLVVKAHAGKGGGGGEHFLHAGTALWPLVTDDDHVSRYYFLFHDCVNAASSESKTLAGPSCFSMEAATALRFTTQPSCAMFPFNAASPPVAE

SEQ ID NO: 108514 - protein, 102 aa, Unknown
  Obtained from environmental sample
  misc_feature (1)..(102): Xaa is any amino acid
MRLFKLDEKIRIKIEHEISRIDKSLDSVMPLLDLCKLKEPDIIEMTAAAQVLHSFYNGVESIIVLFFKYMNEKLPNDLKWHKTLFEMTFGMNSKNIKIIRDD

SEQ ID NO: 108515 - protein, 106 aa, Unknown
  Obtained from environmental sample
  misc_feature (1)..(106): Xaa is any amino acid
MITRLPTFVEPDMPVCAAMAVFSPIVTLWAMWTKLSNFTPLPITVGSKFPLSIVVPAPISASSSTTTLPKHGMRTKTPSAPRALPKPSLPSTAPDCIITRAPICVP

SEQ ID NO: 108516 - protein, 118 aa, Unknown
  Obtained from environmental sample
  misc_feature (1)..(118): Xaa is any amino acid
MVYPSLLHYRIGGFAYAGIPKKFAYVFKTHLSAVDKIFALTGTEKPPLYLNLRQIKRQKAGVVCDGQGYFSHIQRFSGFRAAENNVFHFLGAQGFNGMLPKHPLDCVYNIGLSAAVGA

SEQ ID NO: 108517 - protein, 328 aa, Unknown
  Obtained from environmental sample
  misc_feature (1)..(328): Xaa is any amino acid
MAEGHVLDKHIRTYGVCPGGEKIARYGPAEYRHRRGGRHIAFGEKFSGSRRPVVHHGFVHPCPYIVRLAVRALIADGNHRTSVFADSRENAGNAFQGVDVVIHQAQCACRSGTRVSGHGPDRDQVAAHGFDACQNLGLGAVAESEHGHHRGHADDDAEQGERGSETVGLERAHGKRHGCRKGQARCALRAARGFSPSSGGRFSGVPGCRVTDDLPVVQSDNPPGPRRNAGIVRDENHRVSGRMQFMQQFQHIAAAFGIQRARGFVSKDDLPAVHQRPRDGYALLLSAGELGRIIVQAPGKAEPGQQRGRPWSSFFVAPRPRTWPGCPP

SEQ ID NO: 108518 - protein, 300 aa, Unknown
  Obtained from environmental sample
  SIGNAL (1)...(24)
  misc_feature (1)..(300): Xaa is any amino acid
MPPTLVAFAAGTAPVASIRSGALSGESGNFIVLLAQKESYPAKKANPNLNEWDIFKANMDALAALGALGCIRSAYPVVSGGVATSLALMAFGNNTGIEAQPCAFAAGFPYQGSVLVEIDGAAFRENPRVAEILGVSGCWEIAALTIADHVFRAAEEHDGKMEAGGFLMETLRLAYESPLAQVYPQTSKGNEETSGNLFESNKIQERIAEWISEDNIEKAKGKTRGEIFSLFGNELEPIAYLPYPYLSFLDTEITDNRIYCGKGYFLDHAVNHHSEVDPAEYYNIQQIINYPDNENGSRRR

SEQ ID NO: 108519 - protein, 326 aa, Unknown
  Obtained from environmental sample
  misc_feature (1)..(326): Xaa is any amino acid
MRDPVVDGHAEARPQRIRDYRIVRVRRQRPIRYADSYSFHRLFQXCSNPRDLRFQIHGRLHGLHIAQHPRHALRMTDHQVAARTQQPGKLVHQLLPHDIIEIYHNVPAEDQVERAFHGKRRLGQIQPLERNHARQRAVHRVHFVRPRPLHREILAPQLRVDPLHLRLGVLPRLSHLQYFRRYVGGQYLAIPAKTLGVFEESHGERVRLLAAGAGRAPNAHLVPPLLLNHLPDVIRHEREVVVFAEERGDVRGDHVEKLDELRLRLIAAAGQELQVILVVIVPQSAKTLAHAGRNERLFTFAERDAALVVDQLAKSVERPTSLGRRP

SEQ ID NO: 108520 - protein, 220 aa, Unknown
  Obtained from environmental sample
  misc_feature (1)..(220): Xaa is any amino acid
MLFNRRWGTGYVLAKQVADSKEFGRVSMIYSKFNTSAYRDIDFFVHNHIIHLIDLTVFLAGELSKPVVQSLIFGPKSGALGIHFTALRSGALCTIQSATDEDEAYPMERLDIAGTGGNLTLDNWRDFHWDRSGPARDIDFKLPLEKHGDCLSWHPAGGYGIGRGIFSYMGFESALDEFIKTALEGGNFSCTIEDCVPTIKFTDEVRKQVKKLTVAAEETR

SEQ ID NO: 108521 - protein, 148 aa, Unknown
  Obtained from environmental sample
  misc_feature (1)..(148): Xaa is any amino acid
MVVCSARKHVKPVFNTGSGERLTVINDILRVLLEFRLRSLAESDRLCRYHMGQGPAHSKGAALVQSLGKLGSGKHNSRPRPAQCLVGSACHDMRPGHRIKLARKNLTRHKPGKMRHIHHKDGARFVGNLPHALKIDLPRVSRISRKKD

SEQ ID NO: 108522 - protein, 213 aa, Unknown
  Obtained from environmental sample
  misc_feature (1)..(213): Xaa is any amino acid
MGCGPGRGRKAGPLQTTSRXFVSKNSLDTSTMVSPRQTMTRRLASVTSATTVTSRFSMSACDFSAARSLGAITTAMRSWLSEMANSVPFRPSYFLGITSRSIFRPSASSPMATATPPAPKSLHFFTRRENSSLRNSRWSLRSMGGSPFWTSAPHCSMLVSVWLLLEPVAPPMPSLPVGPPISTTKSPGVGSSRLTRAFGAAPTTAPISMRFAT

SEQ ID NO: 108523 - protein, 120 aa, Unknown
  Obtained from environmental sample
  misc_feature (1)..(120): Xaa is any amino acid
MPSEFSTSHNTPTCGNLANLQRSITASVCPSLSRQPPFLAFSGNICPGQTKSFARFEKFASVRQVKALSAAEIPVVVPSFASTETVNAVSKRLVFLLAIICKFSCSARCSVMGAQTSPRP

SEQ ID NO: 108524 - protein, 178 aa, Unknown
  Obtained from environmental sample
  misc_feature (1)..(178): Xaa is any amino acid
MSRAVVGSSAISSRGRQIAAIAIMTRWHIPPESWWGHASMIFSGWGNCSFSSISIASLLAANKLAVFLFCPEIILCNSNASVICAPIFIRGFSDCLGSWKIMLISFPRICLRDFSSVLHKSTVPLSEEYKISPPAILARAERRPGTDRAVRLLPLPDSPARAIISPASILKSIPFTAV

SEQ ID NO: 108525 - protein, 200 aa, Unknown
  Obtained from environmental sample
  misc_feature (1)..(200): Xaa is any amino acid
MVARAVELGYQHRGGYGRAGGDAYEYEHDREADRHRADGLLAHVAPYPDGVYEAVARAEEVGEEHGHGEADEVPRDAALGQVLAEPFGLRTDVRVYGGGRVYVRVFVHYICGRGDRGARPLNRRVIKYNRLRGYLASAIGFRRRSPVNVKLLALAYLKTLDRDLEAHLEHLLGQFGHFVARFYDRAADRVGHPCGAQRHR

SEQ ID NO: 108526 - protein, 113 aa, Unknown
  Obtained from environmental sample
  misc_feature (1)..(113): Xaa is any amino acid
MFSDSIYSIPLPVLVMPAVPEIAPFSVSDPSTPMVDAPLTCIGPPRVLTPAVLLNAPPPSVSGLFSVIPVVPVAAASRNVAPDAVKRTVPALSPKAPLLAAMTVPALIVVPPP

SEQ ID NO: 108527 - protein, 457 aa, Unknown
  Obtained from environmental sample
  misc_feature (1)..(457): Xaa is any amino acid
MSSPSERQLFCPVCSYPLRPLLLSFGTAQMNILAIVSAEIHLFDFLDQGIPGICAGTLIVKSLFAHFIKAGKKIFFINVVILDGLLDPYLIFKPFHGGDQAFKFFLVVFAGEIHGVRNFRVTGKGLGMIVLGEGSHLGRNLDGVVAEHFADHQGVGDAVGYVVERAEFVRHRVADAEESVGKGHARYGSGVGHSFPRYRIRGAFVVSLGQPFKNHFDGLYREAVGEVCGHDRSIGFQGVGQGVNAGCAGKPLGRVHLHVRVNNRHFRHQLVIRKRVLHALGFVGDDGKRRYLAARSGGGRYRDKVSFFSHFWEGVDPLADVGKAHGHILKIRFRVFVEHPHYFARVHCRAAAQRDDHIGLESGYQCRTSLGTAQGRVGSDVKEGFMDNAHAVQLVGDAFGIAVLVEEGIGNDESPLFSHHVFKLVQSHGEASSFDIYLFGSAEPQHIFPPCRQCFDI

SEQ ID NO: 108528 - protein, 225 aa, Unknown
  Obtained from environmental sample
  misc_feature (1)..(225): Xaa is any amino acid
MLAALQVPVYILYHHHRVIDKHTHREGETSYRYHVERVAHGVHAYKRCDDRYGNCQRDNECRPPVAKEEPQNDDCENGALHRRFRGIARHPLHHLALVEDGHKLHVRRHGGLELREQFLHLVHRFERVGAALLGHHEDDAVPAVHTDVVALLLLRVLNPRHVAYAYGRSVHGGDYCIGDGVDVPEFSHSPHEILLVTGADVSARHVHVGGHERPHHRVRPDLVLV

SEQ ID NO: 108529 - protein, 281 aa, Unknown
  Obtained from environmental sample
  misc_feature (1)..(281): Xaa is any amino acid
MRACEQPAENNKRKQTAKLPSLTIKNESSFDLTDVKFAGISXASSDADLPRTTQAVKQLTANDVNKTGYITFTRKDIGIVLRTEAVSVSDEDLTFTFLDTTVVEEVANSGNKKSLSQISFLSQVTVEYGSLQVAKNETLNFGETVINRSKQADFVLKNTGVGKLLFTGGTEPVKINSTEAGVFSVVQPSGSELAPNGSLLFKINFAPKSAQMYTAAVTISSNDQNGDFTFYINAVGAPAKPVAKVFFGETEILQDGMINAGNVLVGSSSDFTVKIKTPRPF

SEQ ID NO: 108530 - protein, 130 aa, Unknown
  Obtained from environmental sample
  SIGNAL (1)...(39)
  misc_feature (1)..(130): Xaa is any amino acid
MPRQFMRRRLSFSSLTLAMITASRFSAAAAFIKASASQAEQSTAILSWDSEIASSVPSKPAYFFGTASRLTSRPLASSPTATETPPAPKSLQRLISLLTSALRKRRWSFRSSTAFPFCTSAPALSTDAPV

SEQ ID NO: 108531 - protein, 200 aa, Unknown
  Obtained from environmental sample
  misc_feature (1)..(200): Xaa is any amino acid
MMGASGEWELRHSSERTECVWMGDYSENGGGGDGTPTPNLPKYTELDKVDCAVRKAILQAVKDSNRTYKNDQQKYLAGLHEEGGVWGTSANGNLLIARAMPGATVTSGDVMATVNLNNLKDPSVREKIETFLGGFHVHPLGGIVDGVSRLFGQEPSEIDMRNAIYPINIVAAAYTRQIHFFDKGTLYAPMSFDDFMKGCK

SEQ ID NO: 108532 - protein, 162 aa, Unknown
  Obtained from environmental sample
  misc_feature (1)..(162): Xaa is any amino acid
MVQTAGNPDAKGMTLYLVCDISGSMSEGGKCLITRGMTRTIEQYFRLGYGKGEIKLIAWSNEARIVEWVSDNEYPEEMLDCKGAANAKALIELLGEQADGKVLLLTDGFWARDVGTALKRWKNRLLPDTLRIIKIGADANTHLKGSDVFSAEDLFAALDGWV

SEQ ID NO: 108533 - protein, 155 aa, Unknown
  Obtained from environmental sample
  misc_feature (1)..(155): Xaa is any amino acid
MYRSAERAECAXRNRTRRSQGRHRCRSRGARDRARRRRNLHRNRRHPGWGNCRSGRSPRATGAALVAHRTRRPDAIPGRRRRDHHASRTEGRDYRSGLPNERRRQGGYRQRVHDGHRSLERPSRFPDRTRRYRGRCGWRAVHHLRQRGALAGQGR

SEQ ID NO: 108534 - protein, 156 aa, Unknown
  Obtained from environmental sample
  misc_feature (1)..(156): Xaa is any amino acid
MISRRLSPPSRGRSARRIASRWARSPGISGVQRLAANRGTGFWRAGRRGGQKSDARGQERRYRARERDSRLDHELHEYLQSGGAPGGRSRRQKGAGAGDDRAQIRKNESRPRVARGAGVSGARGALRAARGARVQYGRLRLRDMHREQRPALSRRG

SEQ ID NO: 108535 - protein, 303 aa, Unknown
  Obtained from environmental sample
  SIGNAL (1)...(37)
  misc_feature (1)..(303): Xaa is any amino acid
MKSLPFAVQLSLIVFLILIIPFIVLMSYIGSSTLRYSEEEIARNSLEHIELDCRFTESFMNNISGQVHRFAVYHDFYLYEGLQKYSAIQGNVDNGLRIQRLQRELVSIARTDDAILSVFFFFDDGDYIISSDRGIVELADYPSLSWMRTIPAGREGLGGFWTPRELQSSTVSETLRGQDSGYFTRVVSYVYQLSKLITGVMGTVVINVRESSIANHLNPRNDRDNTLGIILLQSDGRVISHPLESNFMVQGRNLPHIAEILDSKGNSGYKFLREGSEQYLYTWLKGRIFRMGVRFGAVHGRSV

SEQ ID NO: 108536 - protein, 206 aa, Unknown
  Obtained from environmental sample
  misc_feature (1)..(206): Xaa is any amino acid
MRGLAPHISMKGRVYAPFRLNMNLILMILMILMILILTPSKSMRPLPRKHHQHRPNQNLYIQSDRHIFKIIQIVKHFLFDILNXRIILMLNLRPPRDPRLHLYSPYVPRYLLLKFLHEKRPLGARPDQAHLSLQHIEKLRQLVQSRLSNKPPHRRYSRIVLRRPLRTAPALRVNVHRSKLVYHIIFPIAPHTLLRIYRRPRRRKLD

SEQ ID NO: 108537 - protein, 159 aa, Unknown
  Obtained from environmental sample
  misc_feature (1)..(159): Xaa is any amino acid
MYNHNVGDRGVVVERLLDARGVYRLLLAVIDAFARDAVNGRDGEDAPPIGAVNEHKQFAVLWNRRRDHRLDPKGAAPLHDHAGIFILRHLGDFQKAAAHITHKLNKGGVARTQIAEHGLLCARACRQRAGRKEYLVFPWGERCKRVFHAGGSFCAIRRE

SEQ ID NO: 108538 - protein, 402 aa, Unknown
  Obtained from environmental sample
  misc_feature (1)..(402): Xaa is any amino acid
MATCITVSQNSSSRSLSTSCTASLSRVLPGNKRRRPLLNRLKRRRRNILKRQPTLSRERMGNLNHGQGTGNSPTKLVREQGTKGRKRQKRQLCQKRRVSHGALGGFKGYVEKLIGLVGYLNASEKTPSERMLKELALRIKERQLVCAAALGYGMLSVLRSIIGRADGSLAANLAFEHWDLDRKLKEQFRIFGANDDEVWRLGEICKAVLYRTGADNSADDTVVNKKTSVFDTGRFAASLFINNHSLADFRRLIGINVFNDVTWFNKEAFESALFYGKLFFVLETDSAYSYPCPDRTARIAEVTEAMKKAEIDCGYRLDKFIQLLSGDEAPQVSQPKKTTATKKTTAVKKSAPPTKTATAKKTEPKKPAAKKPAQESQQKKPTPAAXTAAGKKTIKGKKRNET

SEQ ID NO: 108539 - protein, 170 aa, Unknown
  Obtained from environmental sample
  misc_feature (1)..(170): Xaa is any amino acid
MHLVRHDDHRRVLFRQSADNFQHFARQFGIKRGSRLVKTQNIRFKRQSPGNGNTLLLAAGQLVGIGIPFGGKPDLFQKLYAFPVYFFKNRLFIFFKIRLFLRRQFTRKHHVIKRRILGEQVEGLKHKPEMQPFLPDALFVIMDFFRRVIQGFAAQNNASGIQPLKKIQAA

SEQ ID NO: 108540 - protein, 103 aa, Unknown
  Obtained from environmental sample
  misc_feature (1)..(103): Xaa is any amino acid
MERFFAMNGEETFMTQQAFSLSRQKIKWEAFREMFDFTVNSHYLEYADEIRRWNGMRIYAIDGSKLSLPNDKPLRDYFGTDGAGNTSPTAQGSLLYDILLTRQ

SEQ ID NO: 108541 - protein, 130 aa, Unknown
  Obtained from environmental sample
  misc_feature (1)..(130): Xaa is any amino acid
MRLPCGYDVGTRFVALEHLPHHLNIVAREAPVAFSVHVAEFKRLLRLPGEEPREVRCYFARDELLAAHRALVVEKYPRTSKDAETLAIIHAGPVCHEFGDAVRGARVEGGGLRLRYLLDFAEHFGGGGLI

SEQ ID NO: 108542 - protein, 183 aa, Unknown
  Obtained from environmental sample
  misc_feature (1)..(183): Xaa is any amino acid
MILPSQYYEENLYPLQDGVMNILRHSGTDFFLTGGTALSRAYYNHRYSDDLDFFVNQSKTYDDQLNKVLALLQENGYSWDINNDYTRAKDFTTLKVRKDSETLLKLDFVNDLVPHYGEIIETSLFYRTDSIRNMLSNKLSAIFRYAAKDIVDIREIALHETIDWPMVIKEAQNKEAGLELVIF

SEQ ID NO: 108543 - protein, 182 aa, Unknown
  Obtained from environmental sample
  misc_feature (1)..(182): Xaa is any amino acid
MPSSNMKEEEFFSCYPSSNLASVGNYPADQPVLNRLGRVHPVVAVGVFFNLFKGIAGFVGNQAVDFFAQFFKFFRVYLDIGGDAAYSGKRLVNKVVAVGQAHAPVLRRRKLNDGRRACDKPHAYSPNIRFYKTEHVKYSITGVRVSAGRIDKNTDRLSAHVFQKKQLANGFFSQFFIDCSGD

SEQ ID NO: 108544 - protein, 128 aa, Unknown
  Obtained from environmental sample
  misc_feature (1)..(128): Xaa is any amino acid
MHVGSHEGAVRVVMLQERNEPGRDADELHGRDVHVGDFLRRHNGEIAPITGEEHLLRNLAALVRRRVRLRDNVVVLLVGRQVFYLTGGHTVLNLLIRRLYKPKFIDTRESAQRRDQSNIRTFRRLNRA

SEQ ID NO: 108545 - protein, 254 aa, Unknown
  Obtained from environmental sample
  misc_feature (1)..(254): Xaa is any amino acid
MAEIGQEFLTPIFQGNEKADEIINAIIAEHEKTNLPLVKNKDDILAEKKAVEKKLAEFTEKYAALETANKELNEKLESGLPDKEKNILLNDIEKYKNNITKITEDYNKAKTDYEQQIGDLKKEKTDYIIGEEFSKLINANPAIYPTMKEGLRKIFFSDNPKSGFEPYEYNGKTEYVINGKKMTDLLNDFLNTDEGKHFLQENNNGGGAIGSGGSKGYSGKNPFAKDSINLTEQARLLKESPALAKSLKSQAGVN

SEQ ID NO: 108546 - protein, 134 aa, Unknown
  Obtained from environmental sample
  SIGNAL (1)...(19)
  misc_feature (1)..(134): Xaa is any amino acid
MKKLIILTLIFFSVMGVFGQEKASISGSVEWDTLRINAAVSLNMAQAGIKLPAGRTQGEALLRASYSRLIEPCLLSLQVDSSTTIADLINSGEITLLHIEAISRRANSSSPALSPDMKNITTSVTIPIQISRPI

SEQ ID NO: 108547 - protein, 151 aa, Unknown
  Obtained from environmental sample
  misc_feature (1)..(151): Xaa is any amino acid
MSIFIKHFRNGDNRRLFGSDPNGERTAKVFYKYAEKSFDTAEKRAVYHVGAFVLSVGIDKCHVKAFGFVKIKLNCRHLPLSSERVFNFNIDLRSVKRSATFVNLVGHSLGADCVTQTFQSGVPFALLADRFGGFGRKVRLYFLKTENIPNH

SEQ ID NO: 108548 - protein, 115 aa, Unknown
  Obtained from environmental sample
  misc_feature (1)..(115): Xaa is any amino acid
MRFIWSALELGMELNPGEKTAIRKLNCLDKASVRRHTTDNHSLARQSLPVVIVEFKAVAVSFAYFFRVVQPVQQRALRDFTRIRAQPHGAARADHAGLIGHQIDDAMWRNFVKFT

SEQ ID NO: 108549 - protein, 152 aa, Unknown
  Obtained from environmental sample
  misc_feature (1)..(152): Xaa is any amino acid
MGHRVNLVVGPHERSHKQHTASKALRVTCAADRHVYPLPRAAEWRQLGCNHDCGDIFDLHGAWVNVEPLPGHQVCQALHSELGLVFVTRCIQANHNAIAQQLIAADTLKTGQVFEINLHLALWGGSRKGQRGKNGKYYPNDLFHAAPQKGQM

SEQ ID NO: 108550 - protein, 267 aa, Unknown
  Obtained from environmental sample
  misc_feature (1)..(267): Xaa is any amino acid
MTANYEDDTYIVSKTGVFTVTRATPPDLTLPAASAITFGDALLMSNLTQPSTLGTWGWTSASDIPEASPASGDLAYSVTFTPSNSNYDWPNTITRDVTVHVNKKSGVLTAEPVTLSKKIVGGTSIPVDFDLSEFVLNQTNTGSLVYKLGSLAGGDIVTISPTTSVTATPPILTYTGKNVTSGSNASLPITIESRNYTDVSVTLTFALVQVYSVNVTGGSVNPGEAGVDGDGNGSFIAGKTVTITADAASAGKVFKGVDVCSYNNHLY

SEQ ID NO: 108551 - protein, 291 aa, Unknown
  Obtained from environmental sample
  misc_feature (1)..(291): Xaa is any amino acid
MARSNALFGYEGDKYYFDIDIRRHFGLDKYTSNIIPYWKTETIEAMEAFKFKEGYAGGAGECVSFAALYASAAFAVADIPLDKIFLLATPLHSQNFLDIGEGVLTNNRRIVTKNMWYNGTELSAKARRALENETVTIVAHNTGCIHTVFPNATIDRARYGQIKDKLTKFLSTDITYEILANFLRHKSTLQKYFQISYNRHGKTLYIEAEKVYSYEHSSKLRVGDDTQENLLQEIEDDEFYTDVCPYRFDLGKLQAFLGGNKISINYADGINRLKEQLADGPLSGSHLVNEL

SEQ ID NO: 108552 - protein, 165 aa, Unknown
  Obtained from environmental sample
  misc_feature (1)..(165): Xaa is any amino acid
MMRPHAMAAHVSGSFGSYFDGKPVPPVKEKSDEDDGDAMSKINLNGDDRDRAVTPSNKNGNLVVIGDANFITAQNASGPNVAFLLNLVDWLSLDENLISVRSRTLKDKTIDPNILEAGSAKPGIIRAVNLLLMPIAVIIVGVIISLRRREKAEPAAEGVQTNEKQ

SEQ ID NO: 108553 - protein, 175 aa, Unknown
  Obtained from environmental sample
  misc_feature (1)..(175): Xaa is any amino acid
MASGRATLPILRKKWVTSPVNSAGFADPDYKKSNIVLENDVKSQLLYAKNVSFGAYKLPAFIIEEIKGSVPVEANISDGDLAAWNNRITQRAKSVGYKTDSNATLAYVQGNVVYFGKSPSSPQIGDVRITLAKVPPANISIIARVIGPTFERYLAPNGKNIYKRSDGNGKRRNND

SEQ ID NO: 108554 - protein, 99 aa, Unknown; identical to SEQ ID NO: 107655
  Obtained from environmental sample
  misc_feature (1)..(99): Xaa is any amino acid

SEQ ID NO: 108555 - protein, 183 aa, Unknown
  Obtained from environmental sample
  misc_feature (1)..(183): Xaa is any amino acid
MPVCMYTNLSQSSSRSSVCVMRMSVCPLSLMRLNICMNFPISPGSSPASGSSRITTEGDAKSSTPTCSRRASPPDRLDTRVSRRFVSSMSSSTSAARQWRSFSVLSSGRRIRLWSESVSHTVSSGRSNICCDTYPMLRAKTAPNFAAGKPFINSRPVVGASCPESTLQSVDFPAPDGPKRATK

SEQ ID NO: 108556 - protein, 99 aa, Unknown
  Obtained from environmental sample
  misc_feature (1)..(99): Xaa is any amino acid
MREGGIMGKEKESYFVCPNCGAELPTSARACPNCGSDENTGWSENTYLDGIDLPFDDDDYEEVKKREFGGGKGGGRVNWMAVVGVAVLAAMLMAFVLHC

SEQ ID NO: 108557 - protein, 229 aa, Unknown
  Obtained from environmental sample
  misc_feature (1)..(229): Xaa is any amino acid
MRIFSVYKSMEKAAELCPDGQNIKMLIRHSIRQDVKDDASLETIENALLTREGKKMAERLGESLDMDIGTISSSCTPRCVETCQEIINGYNKNHSKYNHETIRTEILQRPQCKNVQEEHATWRKVGMSGIFDGFAQNIDMPGIYDLETSVNRMVGFMFETGNKNNTIDISCTHDFQLALVLLFLNRKNPEYKQILFDGSGNWPFMLEGMFLWKSENDINILWRNEKYTL

SEQ ID NO: 108558 - protein, 103 aa, Unknown
  Obtained from environmental sample
  DOMAIN (12)...(103): Anticodon binding domain
  misc_feature (1)..(103): Xaa is any amino acid
MVRIGRACNICNAAIACVNAAHSGLYQALAQKLRQAGINCEVFTEGDGKQLTKQFVLAEKKGIRYVIIPGEEPLKAPVTLRDLVSRQNSELTLEQITERLKND

SEQ ID NO: 108559 - protein, 180 aa, Unknown
  Obtained from environmental sample
  DOMAIN (11)...(127): Uncharacterised protein family (UPF0153)
  misc_feature (1)..(180): Xaa is any amino acid
MSKLPKYPKVKCARCGDCCSIPVVPVTHKDVARLVKHTGLPVGKLVRFCPSSEMEFDEDSGLWIKFKSSRRAMVLRKRRERCIFQTPDRACSAYAARPQTCRTFPYSMEFDGAKVTEITLNEVMKCNAIKCSVGCIDINTVVANVKKENREDSEYHKLVRQWNLSRYTGTAKDFLKFIGL

SEQ ID NO: 108560 - protein, 153 aa, Unknown
  Obtained from environmental sample
  misc_feature (1)..(153): Xaa is any amino acid
MRGGNPVNCTFDFFIIRRVTAPCLRIISAAHGCNIAVRVFVKTGAGNDVRVSKADGVAGEEPVIFRGRDFFKILALNPKFAGEGHKALARALVLGVVYRFHFLGFIFFPIFDNQLEGAQDRHYAQCPLVQIFAQAVFKEGDVYHAVRLRDSNL

SEQ ID NO: 108561 - protein, 182 aa, Unknown
  Obtained from environmental sample
  misc_feature (1)..(182): Xaa is any amino acid
MDNWNFDSAFGNFGLEDFYLNLLSKTKFLPTVNNKFISIKENPKLFTAEFPQVFKGEQFNNLLQLLETDANNNLIKKLASKNNIDLNYTPESLCDKINNSSAYWSIEDKVKVFFWWENKYKEKEFLPKLLKDKVDNDIKYKSDCYFVVGNAVTDIPGWANFRELNTEYSDKLFEYAKNEETV

SEQ ID NO: 108562 - protein, 108 aa, Unknown
  Obtained from environmental sample
  misc_feature (1)..(108): Xaa is any amino acid
MELDFEIDKITESIENAETGETLDTLVLPVTKADLEEVTKKNSWLFNWKLEFSEPEKQLYKLVAEQEPXTIHGMVSLEKRAKHIFMHLIESAPCNIGKEKNTSGCAVT

SEQ ID NO: 108563 - protein, 135 aa, Unknown
  Obtained from environmental sample
  misc_feature (1)..(135): Xaa is any amino acid
MRWRRVKLRGFGVPVHPRQDKRREHRHHPRGTDLLPDTDTRNLHIRLRRRGGAYSPAADAHSGSQLHARPHPRRRAALPRHVAAGVASRKMRLGGPDGAPAIRELQRRLNVGAHRGLRNSPRVKPRHSRGNSRSE

SEQ ID NO: 108564 - protein, 118 aa, Unknown
  Obtained from environmental sample
  misc_feature (1)..(118): Xaa is any amino acid
MNMVKTAAVAAARFVVTKIVPTDTTLSPVIETVEPPLKPNQQNQRIKTPSAPRVKLCPGMARTSPDLEYLSIRGPTIFAPISDATPPTMCTAVEPAKSWKSSCASQPLEFHIQWPEIG

SEQ ID NO: 108565 - protein, 132 aa, Unknown
  Obtained from environmental sample
  misc_feature (1)..(132): Xaa is any amino acid
MTNSFSPVNRLFAPARNARACISMPMFTRPALRRMRLFGKSIRAVAIMRMNSKGGGGSMPSKGVPATGCSWLMGMLSGGGSNSVSSCKKCMRSSIFSPIPTMPPQHTSRPAARSARMVCSLCSKVCVVIMVS

SEQ ID NO: 108566 - protein, 209 aa, Unknown
  Obtained from environmental sample
  misc_feature (1)..(209): Xaa is any amino acid
MAEPHRHGHGPPRRGLFHHRRHRPIIGRTEPKHVRRRRDDGASLRRGLPAHSLRALQQPQKGRQKRTVRQADRVDAHSRTHPRTDRPPRTALGAGFPRRGLLHPRHIARRPQQRLPPAQKRHPHNPPHRIQQLGVRIRQKRRDLSQGHNPRNAVAHKQRGGRRERPHKTGENAGRHDRLQTAHRLQVQRRPLPILHHPVAQSRIKTRGG

SEQ ID NO: 108567 - protein, 170 aa, Unknown
  Obtained from environmental sample
  misc_feature (1)..(170): Xaa is any amino acid
MDCVFPDSPTGGIDDSQQVYIIIGVGNDMEVRKNILDLFALKETLSPGYLVGDIRCQKSFFNGSGKKICPQQYAEIVVAKALAYHVFPDFFGNKLPFGVFVFGITQFNGPASGVARPEAFFFAVDVMGNYSVGRFENRGGRTVVLFQFDFFCAGKIPLEHEDVLIVCPPP

SEQ ID NO: 108568 - protein, 179 aa, Unknown
  Obtained from environmental sample
  misc_feature (1)..(179): Xaa is any amino acid
MIEKFLKRLVCGNITQIKKHLVPKAAVEQMQNGVFGSANVQVNGHPKFFQIFCDKSIIVFRVYITQVVPAAASPLRHCVQFPFSFATIFICYVKPIGSTSQRRNSAIARFVIGEFRQHHGIFGFVHQRYFSVFPMNYGEGLAPVALAAKEPVANFIVGGRFANLLFFQPLRYLCNAFFF

SEQ ID NO: 108569 - protein, 186 aa, Unknown
  Obtained from environmental sample
  misc_feature (1)..(186): Xaa is any amino acid
MIFTAYPVHNRVAHHQVGMGHINFCAQGFCSVGIFACSHTHKEIKVFINRTVAVRTVPAGRRYGDIVFIRNSGSPILADFSFGKVVNIRISLFYYFHRKIVQVLVIIGSVIFTVIPVIAHPFYVAFYCFYIRNVFFFGIGIVKAKIAFSAETLRHNKVNVKRLTVAYVQPAVGLRRKTCMHITKSA

SEQ ID NO: 108570 - protein, 119 aa, Unknown
  Obtained from environmental sample
  misc_feature (1)..(119): Xaa is any amino acid
MAGLCDPSVISLIVLAVFIAGFLLGEKGIYLLPSLGFFVAQFWPTLMAVAIVSFGKDAPVFTSAMIAISGLLNAGLQFIVGLTNKSFGPAWGYRGTVVYTLLLIGALVLMRRKLKTGNR

SEQ ID NO: 108571 - protein, 188 aa, Unknown
  Obtained from environmental sample
  SIGNAL (1)...(21)
  misc_feature (1)..(188): Xaa is any amino acid
MNNIKIGPKLIVSFLIVVALAAVNSEYVMNALLEVDDNADDMYEKGVIPLGFLVETADLAQEIRIQTMYWRIAKTDENRAKALKSVNDVHISLKEYIGKQRNLVITEDGRQKLDILQVAIDKYVVEVQNYMRNTTTRCPLSGTTTVDYPPSVLESGTQMRKALNDAIGSKTGSVAELAEENSKMARPI

SEQ ID NO: 108572 - protein, 759 aa, Unknown
  Obtained from environmental sample
  DOMAIN (14)...(196): Carbohydrate binding domain (family 11)
  misc_feature (1)..(759): Xaa is any amino acid
MDIARPSCPDRFGTPPSVLLTDFESAKNTLDYYSYSYKNTASDLESGSEGRVRNGYSIDFAVKGTNENDRYAGIGINLSDNEVTAPLNASTFTGIYLEYKTTGIEKVRVEVIDKAGALNPKGEDFYINLPATNGVWKSATIPFTALVPPSWVKPAPSFNKSNLAKIHIATKTLGTGTIAVDNVYFLGASRFPNQKKYALTYTVNLPEGGCVQSGGGECVSRLTDSVFANETGPAVTAKLSSDQYRFVSWVDGNTNLTRTDVATSDMLFTAIFDQIPVPIEEYTITYKAGTGGGLSVNGGDKVQEYVVKLQKGQTGPIVAALGDLNPPSVFKGWSDGSKEASRTDVVLRDTTFTAEFEAYVAPPTVVRVTYTAGEGGGVGIIAKNDIRYSILTHLEVNKQGVVIASGTGSPVCVDSLLPSDSITVTAWPDSGDINYTFLGWSDGVKTATRVDKYEGGDVNVTAFFVNDVIPPETPFAVFAYSAGPGGKLKVGNEDLTTSVTRSVALGSTGPTVSAVPNDGYRFVKWSDGVTTASRTDNTANVTLNLMVAAEFASTDTAIKTFNVSYTAGSGGKLKINESSDRVTSYDTAVTAGANAAVITAIADPGYIFLKWSDGSTAIQRFNINIQANVSVTADFQKQNAVASPNREIPTTEVAAVSPVVVIAGELTAGPNPTAAAVKFFRTGRAIKTGNLSVYDASGNLITKISLNDNGTGAKRTVGSWNLKDAKGRLVANGSYAVRGTVTTKDGAREKVSAIIAVAK

SEQ ID NO: 108573 - protein, 167 aa, Unknown
  Obtained from environmental sample
  misc_feature (1)..(167): Xaa is any amino acid
MAAVVKRLQSIILGQVMNGKPPTGTPGVDWSGHPFILPQGEYVVWGWSNVKAYEERTQRTYAGRTQGVNIRIMRGVSYRIGGFKGRPVDTEYQHLLGTGVMVATNKALMWSGGKALKAPWKKFIAVKAYSDGLGIYLDGRAKPLLFVVGEGEGWFLKALAENMPTLA

SEQ ID NO: 108574 - protein, 167 aa, Unknown
  Obtained from environmental sample
  misc_feature (1)..(167): Xaa is any amino acid
MLDSDEPTACAVPRSSPEAGRRVQLGKRGLYGFHRAAQRRAGGEVEGDGGARELALVAYGEGRGASLYPCEGAQGHYLAHVGPDVKPQQVFGFVHHARLGLQHDLVLVHLREHGRNLPLPKCVVQRVVQYLRRYAKARRGRAVQQHPDLEAVVLQVAHHVPQYRYLL

SEQ ID NO: 108575 - protein, 173 aa, Unknown
  Obtained from environmental sample
  misc_feature (1)..(173): Xaa is any amino acid
MDRYFQFLSRIVAGDGGSYSLMLRQLHKIEFYPLIPNDDNRGEDGKKLREIFLDDEVPSGPSYLPEGPCTVLEMLIGLACRMADELECGPCRTSASECFWLFLKNLGLGRISDGDYCQKAADGAVEELIGSFLGRAYGENGDGGIFPLKRTRKNQREVEIWYQMQEYLLEEYF

SEQ ID NO: 108576 - protein, 101 aa, Unknown
  Obtained from environmental sample
  misc_feature (1)..(101): Xaa is any amino acid
MGEVEASELYLARQGAPEEFFFFVLFQKPLVQRPVIFKLQCADAVGDILDGIAHTVGIVVHGIYAPLIASPMVVCAANAVHERVSHVHVGMLCVYFCPEDF

SEQ ID NO: 108577 - protein, 110 aa, Unknown
  Obtained from environmental sample
  misc_feature (1)..(110): Xaa is any amino acid
MMLSGGRLDGARILGRKAVEKMTTMAVALPNFCWNAKEKERYYGVGXDMRNGPAFTISPGTFMHEGWGYCSLYMDPKEQMTAAWFVPFTRDEWFPRAQYNVQNVIWSGLI

SEQ ID NO: 108578 - protein, 130 aa, Unknown
  Obtained from environmental sample
  misc_feature (1)..(130): Xaa is any amino acid
MSRWAQGAAGRDEFSEEKGGVYSPARRRRGVXQIGHLALQVFLIFIQEGQGPEVLPRGPRRGHKVGPQPVVVGEEPGAVPAQGYGAGSGQGGHVYDLGRLHLSGPGQGLGQHQAALGIGVGYLHAAAGTA

SEQ ID NO: 108579 - protein, 192 aa, Unknown
  Obtained from environmental sample
  misc_feature (1)..(192): Xaa is any amino acid
MPFGYCAVHGDFRPGLYHDNVAGHYLVNGDFFLFPVFDYDCRLGRKPHQFFYCLARSAFGHRLKGFAQQNQGDDHSGGFKVQSLNRVKIPPGDLKQIVNAVNNRRRGSDGDKRIHVRTAAQKVFEADGVKPVPRYYNRNNQDQLHEAVYQGEIHRGQTLREGKVDQFYHGGHSDIQQGKPQRSGDDKFIHRI

SEQ ID NO: 108580 - protein, 220 aa, Unknown
  Obtained from environmental sample
  misc_feature (1)..(220): Xaa is any amino acid
MGVDVVGKTAGAPVGAGGNLHRPFNAEQVIVYARLKRHGGFRGHPVYGAFYFFVVRRVPALCFRIVSAVNGGDVSRRILVAAGTGNDVAVTQPHAVAREKPEILWRRDFLEILPFDPQFSCKGYFPFPSRFVFRVVHRFDFLNLSRWPVVDNKLQGLYNRHYPKAGFVQVFPKAVLKKGDVRHAVGFRDSHLRDETAYGLRRIATAAEPRNRGHPWVIPA

SEQ ID NO: 108581 - protein, 160 aa, Unknown
  Obtained from environmental sample
  misc_feature (1)..(160): Xaa is any amino acid
MVMGGKKGAAFYSVKKLFAYRPGNGKPVVSAGPASYLVHYYKAFFACRVEDIGGFVHFHKECGLPPREVVRGAHAAVYPVAKPYPPLACGYIRANLGHQRYKGRGAQICGLTGHIGAGDHRKIWGGTLPAVQDNVIGNKLAAAKLGLDNGVARLVNFQCV

SEQ ID NO: 108582 - protein, 303 aa, Unknown
  Obtained from environmental sample
  misc_feature (1)..(303): Xaa is any amino acid
MXXGMIRSAESDKTLGSWFLDKEMANLPGTPNSPDSLVNIPQIRGAKNQSNKNKPIPLVLGKHLYTPMYIGPPYTEIGGADGEDQYFTALYLLGWGKLKVSDIRLGPVSGLAKNPDISGNLNSTEGRWSWDKTPSFFEPGYNPNDPNYKFKYMSPSFKYSNPQLELRQGPNPDPDSLGEVGLYPQKVVEERLSIELLNAEGKPPFDVIRFSAKNPQKVQVEITFNQGLIAYDDXGNKTDASVGILIEWRGDPNTEQWNEFGRFGTNGGLSPTQYNSATKQLPLPGQKRKVCALSLKSHFVITM

SEQ ID NO: 108583 - protein, 143 aa, Unknown
  Obtained from environmental sample
  misc_feature (1)..(143): Xaa is any amino acid
MRIRKHIVGFCCFLELSFRFFITRIFVRMIFYSELFICPLNIVCGSVFWNAQNFIVVSLCRHSILFLFVNNLKICIYRTFFAFFAFVFAVVSARTFAVLSVLVFATWSTAHLGCLQNLTQNALSFVHCALNFLFARGFFGNGF

SEQ ID NO: 108584 - protein, 116 aa, Unknown; identical to SEQ ID NO: 107481
  Obtained from environmental sample
  misc_feature (1)..(116): Xaa is any amino acid

SEQ ID NO: 108585 - protein, 170 aa, Unknown
  Obtained from environmental sample
  misc_feature (1)..(170): Xaa is any amino acid
MGHVDFGPEGFCAVGEFPGPHTRKKIKVFFHAAIPPRAVAPRRRDGNVVLVSNRRAAVFAHLHIGKIVNVCLSLFDDLYGKFVKVIIVIGGVVFPVFPVVAHPFDISLDGINVGLIFFFRVCVVKAQVALAAEFFRHKEVDVKRLAVTDVQPAVGLRREAGVYVIVSPVF

SEQ ID NO: 108586 - protein, 302 aa, Unknown
  Obtained from environmental sample
  misc_feature (1)..(302): Xaa is any amino acid
MGTTYMDSQIHRKFLFEPNPARWNRDFSAMKKSGINYVRTGIWTGWPRMGLEPGSIDENVLRALDAYVQCSASNGIHVCFTFFAFLPLAAPGDNPYLSPRALEAQKALITLIASRFKGSPWIHYDLINEPSYSTLAQLWSTRPIGDALERNAWRAYLSKKFGSDRAFLADIFRDGGDPFALPTSRDFAYSTIRQGRVPRKAAEFYLFANEVIANWASDLRETIRQAGGNVMVTLGQDEXGTGGRPAPPFFGHTVDYTTVHSWWNNDDILWDSLATKIPDKPCLVQETGLMKLEDKMACRGAG

SEQ ID NO: 108587 - protein, 133 aa, Unknown
  Obtained from environmental sample
  misc_feature (1)..(133): Xaa is any amino acid
MEVAVFGTLFHGSNGTHTAVAFECATICQNYFSGAFFCTCKKAAQHNSVCACCQGFNNIARVFYSSIANYANTLFHRFFGTFKNCRELRNSNTCHNSGGANRAGSNFHFHNICAAFRKFPNSLCCCHISANER

SEQ ID NO: 108588 - protein, 115 aa, Unknown
  Obtained from environmental sample
  SIGNAL (1)...(28)
  misc_feature (1)..(115): Xaa is any amino acid
MSGSSSTAMMRTLLQFTSGASSPCFSFAVPRRASMLKVKVEPFPGSDSIHILPPIISTMLLQMANPSPVPPYLRVVLLSACWKEWKRCFCCSALIPIPVSLTEIWTVQIPSFSPM

SEQ ID NO: 108589 - protein, 170 aa, Unknown
  Obtained from environmental sample
  misc_feature (1)..(170): Xaa is any amino acid
MDSWRPGLREMYERAMSADAVAETILASHGGGGNWGGALSIAQSSLDALAAADEETCARIVLWFLWQWTDFLGLRPEFDTCSVCGKPAPHRYSVREGGMVCGSCSEGTAGLVDAGPGCCHWLETTRRLTPDQLSRHTLDKKSFREARSLATAILAEAIGKRLESWEKLCP

SEQ ID NO: 108590 - protein, 125 aa, Unknown
  Obtained from environmental sample
  misc_feature (1)..(125): Xaa is any amino acid
MMADTHPGRGRSPREGRRRRRGQAERRRRRRMPPLHQPVRRGGGRKRVKREARRPRRPLGGQGRVHRQGELRHAQVGRGGLRHYRPLRAAPVLRRDRRNGQQEDESGLSRRFAPHSMRGRDARRA

SEQ ID NO: 108591 - protein, 244 aa, Unknown
  Obtained from environmental sample
  misc_feature (1)..(244): Xaa is any amino acid
MVMYEKAAICGHNNRLNTFFSYVTTPGFNHVYFISAIGMGGIIKFEVKHNIFAGNVILGEYVYGINISTGDTSYNAIANNVFLNRAIGERSWGINSTSSAGGGGKCTVTGNVFKNSTTSTSGNDYCRGADINGDENTITGNIFANSSAGARCVGLVCSGNNNVISGNTFSCGMEAGKTGIVIGLNVTATSNYCTVQGNNFRGVTGASVPGNAYSVNGSAAATLPGSATTIAALNTGGSCGFNIV

SEQ ID NO: 108592 - protein, 824 aa, Unknown
  Obtained from environmental sample
  DOMAIN (490)...(518): FG-GAP repeat
  misc_feature (1)..(824): Xaa is any amino acid
MSGDKSVFKYDEGSIISAYPFNVNIDANVKSSVGGVIVKTKNNDVSLPASGVLVWHVDERVIRQKLEYNIVNADSSYRGVRLVEADGINDLGVTFKDAFYQAAFDYGGAEDVFPHKSIRGDKSRADAEVSGFGPYSRPSSRSNDGGHTYLNININYADGSPRTERSISFQNDTIVNYSDSLFIVDIKYDYLTPGWPRRAAPEASFFDPLVTEIASSSNNNNGNTVLALLGESGRFYMYPLNDTAVTYFDSIPGAFTFPTAVDGKIYVPASSTQSTTTSSLSKTLSPKTTKLSKAPSSRLSKTSQADNVMYVYGSVDIKNRAIIPLPAPPSSYVCGIGDNSWAIGLTDGRIIVGSDTSITNTISLAVNIDSPTPTAAESPVCAIAALNDSIGGFASVRNDGLLSVVRPNRDYAMSTRITKGIPPFTVVTGDLDNDGKSELIVSDSRQGVWVYTRELKLAQGWKDDPNDWANAYYIDPQKRSGVDRNRYPQNASAPALVDLNRNGNLDIIVSGINGIYALNRKGTLLSGWPAYLDNRYWYQRGSVTTSPIVVSSNKNEPLVLFSSPTGERATFAVAKILTADKQTGVVTFRRDDGKLDSLWDMSAKSIDTVLTIGDSLIYPYTLPGGFVDALTSNASRPVSKIGSWPVPQSRWPLSTGASVTTSPLVYRASPNTATSLFAVSSDGMVYRWELSNDMRVDSLYWPQNGFNAARSFAYGGPSVSTEDIVKEYKEPITFWNYPNPTSKDETYTTFKYQFNNNAKNVRLDIQTITGYKMDAFKNLNGDFPGWNEFSVNLKKYGPGIYRCRMEAEVNGKKYSKFWKMAVVK

SEQ ID NO: 108593 - protein, 200 aa, Unknown
  Obtained from environmental sample
  misc_feature (1)..(200): Xaa is any amino acid
MTLFSVTILYFTSQKVPSIKPPKALKSVISPSGLVFNISAKLNTSFAAFTFTVHVANLPPSMVVTLMVVEPAFIAVTVPSPVTVTIEGSLEIHVTFLLGAVSGSIIVFNFNDTPILNPSGEETSKSTLVTTAVTVTVHVAVFPSAVAAVIVAFPPLTAVTCPLMTLATSGLLELPHTVLYVASAGEIIAVRSKVSPVFKL

SEQ ID NO: 108594 - protein, 221 aa, Unknown
  Obtained from environmental sample
  misc_feature (1)..(221): Xaa is any amino acid
MAWATIPCGLTARLALWRYPAFSPLSRFLCRGSSTRQNRKGQYGAAMKTEFSCIICVADMNITNALDQCLAELTLPEVFVQRAKQMSLEDRHGFLGRQITNLEESRAMIYRIYVPSEYETGLVNRIVDATDLKMGGRGCLIVQHIDSYRYNNLSFPADITEKLDKLCGKLGKASXKQHALISCIVPRGEGDAIARALLELGICVPIIFYGTGVGLRDRLGL

SEQ ID NO: 108595 - protein, 132 aa, Unknown
  Obtained from environmental sample
  misc_feature (1)..(132): Xaa is any amino acid
MTRAKMPAPHIADGRDFEFAAFFHITAPGMEVTTRGRVRRIRHFPFKPDPFGPAPEPGIRLGHSGHECLCIRVFGVEVEVPGIRQFHKAAHIHYRHPVADMLHHAQVMGHENIGQGELLLEFLQEVESLGLH

SEQ ID NO: 108596 - protein, 291 aa, Unknown
  Obtained from environmental sample
  misc_feature (1)..(291): Xaa is any amino acid
MYYLRFLAVVFIFLKSFRLCLVVCFVMICVSGCGGKREEDCRIVLEEGASLPAITALAWPDADSPVGCFAFAADDGFIRVVDVFSGRPLAVFPAGEEKISSLAFNSGRTELLSLSESGKSVTYSLLESLGNIVGKPAGGEKAFSLVDGAVCLKDSSSGKEIARYYFFSNFDEWVCITPEGYYNASTGGAALIALETGKRRYRLDSFSGALYRPDLFTAIIKKEEIPELPFTLPDLFMGDSLPPLVSLSLDESSSELRIKIVEQKGGAGYVALYAEAVKRDFRWKFLPDFLA

SEQ ID NO: 108597 - protein, 297 aa, Unknown
  Obtained from environmental sample
  misc_feature (1)..(297): Xaa is any amino acid
MMAGLLGAVGLDRVVVYAIIHKEGEKRLGQIYRWDKSEGGLMSLAEELRILPNIPVLEHLIASITKGDCVRLRESDYNAAQAAFMRVYGIKSILLIPIFTHGGLWGAVSFQDHTNDRYFDDDCFDLIYSASRIFSNAIIRAETEDSAIKAIEELRHREKMEAALNRAAILFLSQNEKTFEATMTAGVGAIANTLNLDRFSIWRNTPSPEVLHVSQIYRWDRDSGGTTMPTESLVNVTYAQFAPRWEKLLASGEIINSPAKLLPEAGLLKSFGCVTAFVTPLFINNVFWGFALHEDRR

SEQ ID NO: 108598 - protein, 162 aa, Unknown
  Obtained from environmental sample
  SIGNAL (1)...(22)
  misc_feature (1)..(162): Xaa is any amino acid
MSFSITLFSMSAFIAASFSARASSPVASICAAKIAALSAPSMATVATGIPGGICTVARRASRPSNVDFIGIPITGSVVCAARTPPRCAAIPAAAIITPKPFFLAFFAKSAARSGVLWALITCASNGIPKSFSLLNAFSITGRSLSLPITIAAFFIFPRFNSL

SEQ ID NO: 108599 - protein, 212 aa, Unknown
  Obtained from environmental sample
  misc_feature (1)..(212): Xaa is any amino acid
MTNANRLYEGLDTNECRNLYANALNKALEIFVSYSEKEVNDILSKGLEPIADAAGLDRITVFRILNIDGMLSGEKYRWDRSVGGTAPIKEDLKKLPISPAINRWISIMSDDSCLSLKHSTLNKDEAELLIKHGVKSILFVPVFTEGEFWGVVTYNDITKERDFDNDCIAMLRSTARMCVSTIIREEKTKNALNAAETLKRREKMLDLLTKFP

SEQ ID NO: 108600 - protein, 278 aa, Unknown
  Obtained from environmental sample
  SIGNAL (1)...(25)
  misc_feature (1)..(278): Xaa is any amino acid
MVDNNSGSIAAVVGMVNFAALNVNASRASTFNCYVPESVRAGQYKLRIVVRPTDGTWRVATLASPADISTAININVTAEQGAAGGGYGVALTNFSTTAGASVSQNELFTVTSAFKNLGSEAFSGGQAGVAVVDNSGNIAAVVGMVNFATLNVNASRTSTFNCHVPESVRAGQYKLRIVVRPTDGTWRVATLASPANVSTAININVTAESGAAGGGYGLALTAFSTTAGASVSQNKVFTTTSAFKNLGSEAFSGGQAGVAVVDKQRNIAAVVGMVNLPH

SEQ ID NO: 108601 - protein, 124 aa, Unknown
  Obtained from environmental sample
  misc_feature (1)..(124): Xaa is any amino acid
MKRGFLYVHDWHPFYMILDEEKLQENKLEVKYPYFIREPEHSDTLGGWFSEAKKSDHYEWMYKVSDIINSLIKAGLTIEYFNEYDSLYFNMGGMENCGNGHYHFPFFDKKIPFTFSLRARLIIR

SEQ ID NO: 108602 - protein, 349 aa, Unknown
  Obtained from environmental sample
  misc_feature (1)..(349): Xaa is any amino acid
MRHYFPGFLNAHARTNSFCGVNHIVIQRHGFYFAFGNGKIDRADLVADKGNHAAVIAFRQKLRGGGAKAGSENTVRGAGDAAALHIAKDSGPGFHSGFFLYLTGDTKSDGRAVFGAVXFALAFFHFRFFYRKSPFGDNHYGKSLARTCPVLKMIANDFFIVGNFRYKDDITAARNPGVKGKPSGLMAHHFNHYYPAVALRRGMKPVNRLGAYRQRRIKTECLIGSYNVVVNRFGKADHVQPLLCKTVACSISTVSSQYYQAVQSQLLVSFYGRGYLITFNIIFLSNCRFKRFFPACPQDSAASGQNPVKILRSERPDAFPDKPPKSVGNTYYCHTIAIICRPANAAFAA

SEQ ID NO: 108603 - protein, 161 aa, Unknown
  Obtained from environmental sample
  misc_feature (1)..(161): Xaa is any amino acid
MSILFSGDFHAGESGELYVINKKTLLRKYRREKYKNIKYHVILGDGSFMWPGLEKNDENNYMELARRPFPVLCVIGNHEPVLGIMDKLPEVDIGIGDTVYQIRNNPFVAYLKRGKTYAIDGFKFLVLGGALSIDKAAHTPWKTWWENEYGTDGEKKNCLKN

SEQ ID NO: 108604 - protein, 103 aa, Unknown
  Obtained from environmental sample
  misc_feature (1)..(103): Xaa is any amino acid
MARTQNDRATFGLSSGAAHIWQFDAVVCGVANXVDHRIAELLDEALVDFCVLADHLQFDLFAAGLSQVPQHAGELVEDRLHLHHADAHDGGLYLFRDLVQCDA

SEQ ID NO: 108605 - protein, 127 aa, Unknown
  Obtained from environmental sample
  misc_feature (1)..(127): Xaa is any amino acid
MCWGWAGGDSDDRWVAGYPWLQLRVRCIGGDHHGGQGACGVGDGVGGDQRQGGGRDGQASHWNFHRHDAGGRQGAAIAARHHGRDRSGASVHGRHRHGGAGGRGHRGHAGVAARPRDGLAGGVAGLD

SEQ ID NO: 108606 - protein, 114 aa, Unknown
  Obtained from environmental sample
  misc_feature (1)..(114): Xaa is any amino acid
MANPRKVVRSLSQVPASGTRACFGEKALFYFCVSFVYVIGVSTEGTPAERPLAFAKQRPDVSWDKAWEIKGISHAVVFCHLADVVAIVNHGAAHGLKVQHGLHMHRAGFASGGF

SEQ ID NO: 108607 - protein, 180 aa, Unknown
  Obtained from environmental sample
  misc_feature (1)..(180): Xaa is any amino acid
MNQCWHKAANEGLLLVQQASVAARSAQNSAKHIAAPIVAWECAVCYCETERTKVVCHNPVRHSALVCIVWHTGEFSNFVYDRRKHIRFVVGILALQNCAHSLKAHSRINIFVFQWKQLAALYAFKLHKYIIPNFNIAGIRPIHALHRVCKSCILGCKVSFIVVNFGTRTARTRISHFPXI

SEQ ID NO: 108608 - protein, 216 aa, Unknown
  Obtained from environmental sample
  misc_feature (1)..(216): Xaa is any amino acid
MENGKLVKKLAHVRELINIIQNMLKRDQRNFEEEIQQAADAKRNISEVLYELTGDDFYTQGESKMGINRNIDALKSPMPERVRRTIARVKEELGIVLLVIETDRTQLIQNAYYAQGRESLEEVNRLRGIAGLGPIKAEENRIITNARVSNHTGGGAIDMCPEVKGKPGQPWWDAPKEIWEAIGRIAEECGLDWCAGGYGQVWAKNWDNPHFELMKS

SEQ ID NO: 108609 - protein, 174 aa, Unknown
  Obtained from environmental sample
  misc_feature (1)..(174): Xaa is any amino acid
MASVTDSPAATAAALSSCGRRARRRRGGGRRRPSPSGSPSVPSGSPSGSCRARCPRHRRNTAHPWQPRACLPPRGPSCKSTPACVPCRSWHRTASRRGCGAQGRLALSPDRRPRRCWPPAWWASASWGLCPCRASPCTASAAPCQGRSRRPARRARRSRGHAPPASRMKGWSHS

SEQ ID NO: 108610 - protein, 317 aa, Unknown
  Obtained from environmental sample
  misc_feature (1)..(317): Xaa is any amino acid
MLAQIFHHFERILHVTFHTQRQGFQAXKEKERMERTYGRSRISHQGDPNFYDICEISHRLGENYAVIAGIWLRQTWEFIVCRPVEFSRVHYHATYNRSVTAYEFGGGMHNHICTVLKRAEQIWWRKSIIHNKRNAVLVCDSCKCIKVNNGGIWVSKRFHKQCPSFFVNGFFKILRVTAIHECCSYAQIGQGVGKKVICSAINAFIRYYIVPRCCDILYSISHRRCPRRGCQSTYAPFKSRHALLKHIRCWIHQASVNVASLRQGKPSSSLRAILEHVRGCCVNGHSPCVCGWVWFFLPSVKLKRFKFAVFHILQGNI

SEQ ID NO: 108611 - protein, 152 aa, Unknown
  Obtained from environmental sample
  misc_feature (1)..(152): Xaa is any amino acid
MGKRAIAVNGLTDEEITKRRNGDNYPKYFHEDISTFRYSFCNDTRHFVGHNIYYDKQYIDFWLPNIFCTMRTNTKIIGLKKTDGKPKYPSLNETALFYGVETDKNKLHGSMYDSYIAYQIFIKMLENEKIRDKPLAFLEAGGGEKYVVDKRA

SEQ ID NO: 108612 - protein, 276 aa, Unknown
  Obtained from environmental sample
  misc_feature (1)..(276): Xaa is any amino acid
MGILKKAEFDTGELTIICGKNNTGKTYATYALYGFINFWNEEFDYNWLDKEAAKILFNTGSVKIEIDSIRHNTHNIVIDACKKYIRRLPRIFATNHEYFSNSGFEISLSETETDFIGINRTVHAIAPNGKSAFNLYKKSGENNITIDILSKAEDGGKINEDAFAFQINHNIKKILFNHVFPTFPATFIASIERTGAAIFQRELDFTRNRILDQLSNRNTDINPISMFNTFHYKGYALPVNRDVDFYRXLNDVVKYESVISKENPEYITSFDLMVGR

SEQ ID NO: 108613 - protein, 101 aa, Unknown
  Obtained from environmental sample
  misc_feature (1)..(101): Xaa is any amino acid
MAFIDNYNFEYLQNEAEKLVFAELGHQLETYTEPICLCNDCVVDMAAMALNTVKPLYKASLMGIMYVSVAMEEEEYANSLRESVSNAIEKVRKNPSHETNN

SEQ ID NO: 108614 - protein, 143 aa, Unknown
  Obtained from environmental sample
  misc_feature (1)..(143): Xaa is any amino acid
MSRKVILPCGVSTIYAPMCWVIPPNSPDTTSAFRIASSSLVLPWSTCPITVTTGGLGNISAPSSVPVSMIVSSYRLIIFTSAPNSRASIVAVSASICWLIVTIMPSFISFWIKSDAFRFIFLANSDTEIFSMISIDLGTGLAT

SEQ ID NO: 108615 - protein, 147 aa, Unknown
  Obtained from environmental sample
  misc_feature (1)..(147): Xaa is any amino acid
MWSSTSTMSVSKSLTLSILYILDPVPAGIRLPMIRFSLRPPKASILPSTAAFESTFVVSWNEAALRNDSVVSDALVIPSNNGSKVAGFPPSDSTLSLTLRNSLRSTSSPSRKSVLPRCSILTLRNIWETITSTCLSLIVTPCRRYTA

SEQ ID NO: 108616 - protein, 200 aa, Unknown
  Obtained from environmental sample
  misc_feature (1)..(200): Xaa is any amino acid
MKPVDIFQNIRRVKQPGFGSSRQIDLGYVPGDNRARARADSCQEHFHLFFCGILRLVEDNRAVIQAAPAHIGQRRDFNSPRVFHSVYDFVGDEGFHRVVQGAQVRAYFLGKVAGKEAQVFTGLDHGPRQHQLAEAFRQNQPQRLGYGQVRFARPRGPYAEAYLTGPHASDILRLPLAAGVDPAESVGDLYNGMEGNRPAG

SEQ ID NO: 108617 - protein, 137 aa, Unknown
  Obtained from environmental sample
  misc_feature (1)..(137): Xaa is any amino acid
MLSIRERKQATHSAASSPVQILLSYSMYLSRTSTGDKFGMTTLAPARIPRSRPWASTVPIAVVAGISRLGCIRRNMDRMFSVRRRSPSHEPPKGVSECGTKGPMPTMCGCSSFMNIRSSTMWSGVWPGEPTMKPHPT

SEQ ID NO: 108618 - protein, 137 aa, Unknown
  Obtained from environmental sample
  misc_feature (1)..(137): Xaa is any amino acid
MLTVKAPAAIKRIWSVLTGPHLVLTVAPSTMGSISRCTPSRETSGPPPPRSPLTAILSISSIKIMPVSSTRCRASSLTRSRSINFSSSSALSISRARATVTTLFFLPPPKKLAKPERFVSISSMLTPIISKGGNWGF

SEQ ID NO: 108619 - protein, 185 aa, Unknown
  Obtained from environmental sample
  misc_feature (1)..(185): Xaa is any amino acid
MNLTLKILTFMSTSIIVHPAHPARHPSPAAVSPAALILLLRHIGDDALGGQNQSRYRRRVLQSRPRHLSRINHADLDQILVLIAERVVSVRALPVLDLVADHRRLLARVRRDHAQRLLAGAADDVHADLLVALQFQAGDRRRRADQGHAAAGDHALLHRGAGGVQGVLDARLLLFHLNLGRRADL

SEQ ID NO: 108620 - protein, 130 aa, Unknown
  Obtained from environmental sample
  SIGNAL (1)...(25)
  misc_feature (1)..(130): Xaa is any amino acid
MLIEEKSLMPAAFSFSVFNAPVALASIALGLKGGYSALYPGNNSFAAGLAAAVSFVSDAQEELVFVYADEQAPPEYERCFNTRPLPLALAFLLTREPQSSSVPLLPLREASDPLDFLRRILLCGKLHVTS

SEQ ID NO: 108621 - protein, 129 aa, Unknown
  Obtained from environmental sample
  misc_feature (1)..(129): Xaa is any amino acid
MDHRDLQFLYNMHTKVHRPRPKYHGDRQRRRDLPLHTGRHSRRPLGFQRIQHAAVPTAHQRLGVRADKSRPRQTLQGTAQTHEARQPSGRFAHGGHSPGALRAHQHGQARPRDARQAQSHPLRGRRRGR

SEQ ID NO: 108622 - protein, 218 aa, Unknown
  Obtained from environmental sample
  misc_feature (1)..(218): Xaa is any amino acid
MAIEKHINFFELQKACEKPGCPLCTIVRERAFRYIDNTLFEHVADRGFRALFRAAGGFCSFHSRGLVSFRDGLAVAILSRDILEDRITSFEKKLPWRPKGRCPVCIEREKIEQEYLDFLSSSGGNSIEEQELREFFTSSDGLCAPHYAGLLFTPKGQKRTVPVWIKNFQEHKFKELMKRLDVFIDLSAYGRQKEFAQLSEKDQLVWKDAAACLSENIE

SEQ ID NO: 108623 - protein, 198 aa, Unknown
  Obtained from environmental sample
  misc_feature (1)..(198): Xaa is any amino acid
MAKILEKSPLVNLAEYNTETDFYNEHKLLYINLSDLETINERIKKLVAKQKGKLNPFIVELVEDAPGSSDIFSLEDIERKYLPRLKHFRGNTDGTIRVLEIYPAKDNSKLTDLRELYRLVATKADSLRKQKNVNVFYGGTIYDSVANSRTMLSEVRTLAWISAIYIGCYIRFLMSQNTSNIINHCFLLVYGYFMDFCN

SEQ ID NO: 108624 - protein, 111 aa, Unknown
  Obtained from environmental sample
  misc_feature (1)..(111): Xaa is any amino acid
MYYIEAPLLISFKPIPEFRINVGHYVSYGLFGTTETKIASTTDKQKSFDFLDEFDFGLSFGVGVEVMKYYVGLNYEFGLIDIREDKDELEKNEGYKETKNQTWALTFGYYF

SEQ ID NO: 108625 - protein, 142 aa, Unknown
  Obtained from environmental sample
  misc_feature (1)..(142): Xaa is any amino acid
MTTDILSWLSLIASSVPSRPSYFFNILSKLTVSPSASSPTDTLTPPAPKSLQRLIRRAAFGLRKRRCNFRSSGALPFCTSAPQVSNEDEVCDFDEPVAPPIPSLPVRPPRSITTSPGIGVLRITFSEGAAPITAPISMRXAA

SEQ ID NO: 108626 - protein, 187 aa, Unknown
  Obtained from environmental sample
  DOMAIN (124)...(181): Bacterial regulatory proteins, luxR family
  misc_feature (1)..(187): Xaa is any amino acid
MLRDKEFRPSSRVYRGKKTRESILFGRVEMLAMEACVRYLMKDKEKAFAALRNAYENAHPNGIVMPFIEMGKDMRTLASAFLKTADNSIPQSWLEDISRKSATYAKRRAQIIAEYAQAHHLTCSIAITPRETDILKDLSQGLSRAEIASGRNLSINTVKMVINSLYSKLGAENVADVIRIAAKRKMI

SEQ ID NO: 108627 - protein, 184 aa, Unknown
  Obtained from environmental sample
  misc_feature (1)..(184): Xaa is any amino acid
MSEEGTVMLMYGEKEVGWTDPDPGATGADGSPARIKPIPITPGSADYGNVTWGPRFPCYRAFEIRNSVQVTDDIFAPDGSGRDRYGDVNIRQMYVPYAQKTENIIPPLYFLPEQSMDMAALRTNINIYVDESIAKFVVGDLDIDAGWTAFQNNLKNLGLQRYLDIIQTTYDKSPIGTRYGKKSL

SEQ ID NO: 108628 - protein, 114 aa, Unknown
  Obtained from environmental sample
  DOMAIN (4)...(98): Plasmid stabilisation system protein
  misc_feature (1)..(114): Xaa is any amino acid
MYRLRFSKLYQSDLDESYNYISKKLENPMAADRLIIEAKKKLIEVRNNPTHRPLVNDEYLANLGYRIKFVRNFLIFYIIGDDNKHIKIVRFLYGKRNWMNILKEKTVEEMMEDE

SEQ ID NO: 108629 - protein, 286 aa, Unknown
  Obtained from environmental sample
  misc_feature (1)..(286): Xaa is any amino acid
MSVKCMGAFYGYDEFGFTLYHAESNTVKPVLDNDSLYIQGLKFFNTAYQMGILDPDSATQTFSDVVEKYADGRVYWSLFSWLGPSNYNTAERLAQGKGMFAVAAEDQKNIVYGTSIYGKERVWAIGSKAKYPERIMELINWLCTPEGVMTSNWGPKGVTWDYDSNNKAYLTPLGIEIQDGNKKAQIPESAGGGQYVDGENKINNTTYTINDINPVTGERYNKDFWSSELNRVTNPARKAWQQAMGVMTEDDYLEKGNFKALVVASDYVKEKRSDVLEQSTCRFQTR

SEQ ID NO: 108630 - protein, 194 aa, Unknown
  Obtained from environmental sample
  misc_feature (1)..(194): Xaa is any amino acid
MHAVSGLFHSHRWVLFAFPSRYYTLSVIGSYLALEGGPPVFAPGSSCPALLLNRPPAHPSYKGLSPAKAPLSSGLLGLTHRIMPAYPALLRFGLLPLRSPLLRESRLISSPPGNWMFRFPGFAPASLRVSSPKLEGLPHSEAQGSLDGAPRPGVSPLPASFIADRCLGIPRVHILFITLFSTHFYFLCFLFLLL

SEQ ID NO: 108631 - protein, 331 aa, Unknown
  Obtained from environmental sample
  misc_feature (1)..(331): Xaa is any amino acid
MTNSVFALPAATNTVQPVLDNNSMYIHGLRFFNKAKQMGILDPDSATQTFSDLVEKYADGRVYWSIFSWLGPSNYNTSERLAQGKGMFAVAAADQKNIVYGTSIFGKERIWSIGSKAKKPERIMELINWLCTPEGVMTNHWGPKGVTWDYDANNKAYLTPLGIEIQDGNKKAQMPASAGGGQYIDGENKMNNTTFTINDINPVTGERYNKDFWSSELTRVTNPARKAWQDAMGVRTEDEYLEKGNFKSLVVASDYVKPKRGDELEQKYVQVSNAIKNGSWRAIYAENDAEFDRILREMTNQAKAFGYDECVKWDQEQGTIRAAAVRRALGN

SEQ ID NO: 108632 - protein, 122 aa, Unknown
  Obtained from environmental sample
  misc_feature (1)..(122): Xaa is any amino acid
MQVLVVGQHRVGLRAEKGDVPKTEQGHYYGHVAAEWRCSEMDVHSVEASKHPVERVGSDGQHERKTYSTVHAVAAADPIPKAEHVGFLDAELRNLFLVCRDGHEVLAYGFFVLQHAQQPLPR

SEQ ID NO: 108633 - protein, 167 aa, Unknown
  Obtained from environmental sample
  misc_feature (1)..(167): Xaa is any amino acid
MKTLSIRQPFASLICRGIKTIENRSWDTKYRGKLLIHASGKPLAWPSFDYLPHDFVKGYQKYYGSSKTIPKEYAAFIKWIEELSNFYKLENIPFNQPPDIKDRAKQHGYALPVQAIIGEAELVDIVKNSKEVFAIQGDYHWVMANPVLYEKPILNVMGKLKLWEYTP

SEQ ID NO: 108634 - protein, 124 aa, Unknown
  Obtained from environmental sample
  SIGNAL (1)...(34)
  misc_feature (1)..(124): Xaa is any amino acid
MKSLIERCSRIFSFVKALPLSSKTAMPASTSCSARGKSRVITRSPLFASSKMRLSASPSPGGQSSKNTVSNSGSPGIGRLAAKTLLIPSLDEKRSIISRAGRGHESASTRICIIRKFLPKPNKR

SEQ ID NO: 108635 - protein, 149 aa, Unknown
  Obtained from environmental sample
  misc_feature (1)..(149): Xaa is any amino acid
MRPAQENGAGAVQAVHLQPPRAQGTRRHHPPGQRDGGAGRARGVGRAGRCHQEPPRAAQPRPHAAPPWHTGVPAHLGGGQGHTPAPIGLHRVQRRLRWRPDGSPHPLKPHGPDRGQGADDVHPEHPQPRQRQAKRRPQPGHRAGSVLPH

SEQ ID NO: 108636 - protein, 120 aa, Unknown
  Obtained from environmental sample
  misc_feature (1)..(120): Xaa is any amino acid
MHREACAAAARARARPGAPGGAVRDPAGGSRAGVKRAAAGAGEAGPGIEGDGHCGGAGNRVCGRGNRGNPARRGGAELDGAAASRRCDQRGAHGSCRAAPGPALAQSALPRAAVRQPREA

SEQ ID NO: 108637 - protein, 275 aa, Unknown
  Obtained from environmental sample
  SIGNAL (1)...(28)
  misc_feature (1)..(275): Xaa is any amino acid
MTGIGRAWRSASGGAFSMAISTDGSLWAWGTNTSGQLGPWRLCASECPNPGGICAGLGRRGVWRQLRCCPQRVRHSLGVGHKRLGPARPRRHLAADFPYPSGRSGGMVGCGGRRSRQLHSGHQERRHPLDLRRQLQRSAGPRQQWWRHKPDCLHAGGRGQKLEVCVVRRVPHGGSKERRQPMGVGHELFWSARRWHQHQPGLPRPSESGEGLDRRGGGPLPHSGPQGGRQPLGVGHKQLGPARRWHHHRSERPSAGGRGEGLDRRVGGRQPHARH

SEQ ID NO: 108638 - protein, 128 aa, Unknown
  Obtained from environmental sample
  misc_feature (1)..(128): Xaa is any amino acid
MMDENNAALKSFDNSQKILETLPEAGHSELRFRNSYNSGIIYFEEGDYKSAAAAFKDALRADGRKIEAKRNLELSLMSAARQVNEDNSEKRTENETRELLFNFIKEEEQRLWKSQEWGPEEKFTGADY

SEQ ID NO: 108639 - protein, 166 aa, Unknown
  Obtained from environmental sample
  misc_feature (1)..(166): Xaa is any amino acid
MAYLVLAVYPFDIDVRGGLEPGVVQTLYHGEVSVAQFYVLAHDCDVHRPLPRTDPARHRLPLPQIRFGDVERKPPAHHAVEPVPMEHERRLVERRQGHVLYDAVGLDVAEERYFILDALAERFVGAGYDHVRGNTHRPQLLHRVLRRLRLVLAGAFEIRDKRHVYE

SEQ ID NO: 108640 - protein, 111 aa, Unknown
  Obtained from environmental sample
  misc_feature (1)..(111): Xaa is any amino acid
MVDYAVLNLCLGIHALYRVREAGEPVYASDQDVLDAAVLQAVQHGGPKLRALVLANPHTKNVLFTGGADPDGDIHGLLDHAALGTHVEMDRVHEHYPHRRGPAGGPCPPEP

SEQ ID NO: 108641 - protein, 273 aa, Unknown
  Obtained from environmental sample
  misc_feature (1)..(273): Xaa is any amino acid
MPQGYFVQQFPVRVYDVHYVYGLALRTVLPDVFKRLRRGHVRPDFHETGRHHPADAPLRIPKQMARLRQILRRQEAEQSPRHFRRHLVYESGAVVRVEFREQSAYLAVGQLLEQVVLHTGREFGKDLRLVVPRQKAQQQHPRRLVYRPDEVGDLRRRPDDERVAHIRPLPFADELHYLRGKQFFKHYASTELFQSQRPGAQHPRVFPHLSRHDFAKIEYLRPAVERRIFLDRLKHHAARHHHAAAQHHPVGREGVDHYPHGAAEHVARPFVHL

SEQ ID NO: 108642 - protein, 269 aa, Unknown
  Obtained from environmental sample
  misc_feature (1)..(269): Xaa is any amino acid
MSDSPAGCSLARQLRKAGCNLYILSPTIWHNPALSSAAKHLSTYAIPSGSVCFSIYSMKPAPAKCSCKPSRRKTGAKALSSPCSKTANAAEMRFVLSSPFMPLKLISSSLNNSAAERSLSRSSIARTASGFPSNLSSNVVKCTSLLILSPRSATTASQYCQSSSPCSPPRGKRKHSCTLSHSSVDRLVMRIFVFPPRSSRSSCFNRCLSSSGISADTSVPGMPEADSKLSHNRKYRPALNFLTTADNLSSRGRAKVCMPNNSPASVSIT

SEQ ID NO: 108643 - protein, 263 aa, Unknown
  Obtained from environmental sample
  SIGNAL (1)...(22)
  misc_feature (1)..(263): Xaa is any amino acid
MQTRPPCFCLICGFCSSARDFASGFLQIPPRNGHPCLWLTLPAATRVADFHRQVTAHAGRTKKAPAAASQPAGAISMKLTLSLFPFLLRSAGRRERKHIRRHFLFFRFQPLRLFADRLQQGFLNFFRLYKFRRIEMRVPFRHPFALMRGYRLRLFRGHPALQHFRIEKMPPCVDMQIALYNLGGGNPDIYQSLSQMYQNCFPANRAAPAVGGKQVAVPACLFQQLQIGNQGSRKGYVMLVFCFGRPVAVYVMLHADVNGSRPI

SEQ ID NO: 108644 - protein, 120 aa, Unknown
  Obtained from environmental sample
  SIGNAL (1)...(44)
  misc_feature (1)..(120): Xaa is any amino acid
MQVIRGVIIALVLLPMRKVFTEERYGFLMLGLLILGLSAASTFAAATGSFEGLIYTRLPVIEHLMGYPEAFIWISVFIGILWVFYKFEKKAINITAIVLLVLITFMGIMGYLDALGLLSA

SEQ ID NO: 108645 - protein, 101 aa, Unknown
  Obtained from environmental sample
  misc_feature (1)..(101): Xaa is any amino acid
MSKLQLLNPDVRRYFEDFIGRLDRQGLRYTILETLRTIEVQEAYYAQGRRPLEEINNLRKKAGLYLLGAEEGKKIVTKTMDSVHLIGCAADIVPVIDLVPI

SEQ ID NO: 108646 - protein, 113 aa, Unknown
  Obtained from environmental sample
  misc_feature (1)..(113): Xaa is any amino acid
MRVEARNGLHIVVQHVGKAVQHRFQRIDRSKEIGYQHLYRRFGNLTAYTRHRVRKRRRPAVGQVVPRYRRYHHVPKPHPGGRLGKTLALVNINRARRPGRHTAECAVTRTHRA

SEQ ID NO: 108647 - protein, 114 aa, Unknown
  Obtained from environmental sample
  misc_feature (1)..(114): Xaa is any amino acid
MSSLLYTIATNICLNRLRQRKRQGGSIDNLSSSQTSPLLAENDSGLERVEDSMLMDAILQDESESTRAICFMYHGDGMTMREIGDVMDMSVSGVRKRLISFNDRVKLKLRGDKL

SEQ ID NO: 108648 - protein, 177 aa, Unknown
  Obtained from environmental sample
  misc_feature (1)..(177): Xaa is any amino acid
MRNDYHRHPRLAAALLLHDGGYRYSLGAQTARYRRQHAGVVADVETQIVPALYPLDGNKRHLFVGTIVIHRHPLGAVVRDVPGGVYYIANHGGSGRHLAGAPAVNEYLPNGVALQQHRVEHVGDRGENVAFGQHGRMHAHVETVRVPLDDAQQFDDVAKLGGELDVLFGYARNTLHR

SEQ ID NO: 108649 - protein, 193 aa, Unknown
  Obtained from environmental sample
  misc_feature (1)..(193): Xaa is any amino acid
MPMRHYFQTVTLGSFTWKDEERLRLLYSHIRAEGVGILFFHFLLITICLNFPVTFNIARADPSEFYSRLYGETFELEADETADFNLAMIESGYGRNMLLPMLWMSYFVIFITLAVFYLCAAFFLRIARMNAFAMDFRSRLSLALFSSTLPALFSAVLGFLLPAVHIIVFCLAVIIITFQRSNNLRTAEYSKMP

SEQ ID NO: 108650 - protein, 218 aa, Unknown
  Obtained from environmental sample
  misc_feature (1)..(218): Xaa is any amino acid
MLVNRLLKEGALLPKKDDVPTFGAYAVNWWDWENCEYLKKRRKRANLTQSYSDHMKRNLNKVVLPYFKNMKMDAITPTVIEAFLDSLIKQGYKHATINDYYGTFKTMMIEAVEREIIAKDPTAKVERLINNCKTIRIITPLEFKKLFVGDWRKVWEDNRIVYTVNKLAALSGMRVSEILGLKGIVFLMIIFTSVCNMTYTVTDRPKQKTGTIYRFQIP

SEQ ID NO: 108651 - protein, 406 aa, Unknown
  Obtained from environmental sample
  SIGNAL (1)...(34)
  misc_feature (1)..(406): Xaa is any amino acid
MKQWSNPRKYSRLFIVFLNNRGIVLLLGLLGRFANDLLIPYRLLWIFIDSIFITLAVLFIYSTVKLLCNSQVSLITLILTMAFLVFSACITPLANTHGDWYTCYTDSSSMPFTTISVYCFARFIVTNDDNRRKTILVLLGSISSAVGSLFKPTALITVIAFVLILILNGKDAIKNRNLLKIVAFIILGLCLVIIPFEKIYDHFETIDAKPTASIEHMLIMGMLNTLQNINENGVMVFKDTPSLDPFKDRGRWNYAEAGFPRKKVLYERIKKMNIALLGFYYLKDVYNFSFSYGFHSSEFSKVNSPESFYKTPFLRKWKSCILRIQIPIRAVLWNIVFWQIGIWAYLLLKNKIKLSPIESFFSLTMLGVFAYLTLFESGDRYVMQFWPIFLIVSSLGLCLKKRESSK

SEQ ID NO: 108652 - protein, 290 aa, Unknown
  Obtained from environmental sample
  misc_feature (1)..(290): Xaa is any amino acid
MTXEASGSRRLQRQAALGPSAAPPMTRIVCGMGLLLSVGGDVATRQIEALPYDSRRKQTKYSWLPLGPRMAAGTTPSRRSPSSASQKAHTPSTACRCRASSRTTPFFTWCGASSNCGLTSATTSAPAFSHCMQFGSASVREMKERSATSKSTGSGIQSAGAVRRLIPSRPMTRASRCSRSCNCARPTSTAYTRAAPCWSRQSVKPPVEAPASRQTQPSGRMAKCSSAVNNLYAPRLTKRSGSDSANKVSAAYAWPGFSTRTGGMPVDTRPAMMSRRACSRLGAKPCSKTR

SEQ ID NO: 108653 - protein, 157 aa, Unknown
  Obtained from environmental sample
  misc_feature (1)..(157): Xaa is any amino acid
MAECLFPAAGYTLPSIVDTGSLSAWRTPIFLWHSSTSHHFAQHEYGHVHRNHNEANDHGKNDYHHRLHQGSQGCHGIVNFIVIKIGHFCQHCVKGTRGFADTNHLDDHWRKHFRFGQRACDGVSLFNRVAALQHRILDHLISSGSSRDVHPLQNWHS

SEQ ID NO: 108654 - protein, 186 aa, Unknown
  Obtained from environmental sample
  misc_feature (1)..(186): Xaa is any amino acid
MCRSPKAESGNDGLDAGMRKISDYLNERIPKGNKVVFLNVKSDWPDLSEYILSGLSENAVNDRVFSVVDRQQLDSIRAELNFQWSGEVSDKSAQEIGQMLGAQIIVSGVVTKIGDEYRIQVRAITVKTAEVQGQTTQMIDGKGKRVVALTKKVVPAGSGGASSGTSTASGTRTQTATGSGQSAQAA

SEQ ID NO: 108655 - protein, 120 aa, Unknown
  Obtained from environmental sample
  misc_feature (1)..(120): Xaa is any amino acid
MKNLGLSEGVSAGGRVQHKVFQITRGLRFLLHYPVYLAQFFHQRGFCVHPSGGIGDNDVRAGRHCGFQRVENHRRRIAPLFMGHYARIKLLPMNFKLINGRRPERVRGGKYYLFIIFFFI

SEQ ID NO: 108656 - protein, 106 aa, Unknown
  Obtained from environmental sample
  misc_feature (1)..(106): Xaa is any amino acid
MAPLLPVGKQMHGGGGFVEYVDCLIGEAAVAYKAHREIHRRLDRGFGILYVMVFFKLGLDSFQDRDSLLHRGLLDLDRLEAAGERAILEKICRYSSWGWSHTANRP

SEQ ID NO: 108657 - protein, 148 aa, Unknown
  Obtained from environmental sample
  misc_feature (1)..(148): Xaa is any amino acid
MADRGIGQPGLDVVLGQGDAGGGHDGQGGQVGRGLAQAEIVHGLGPEEGEDDSAHREDPGLDHGHGVQEGRNRGGGHHGRGQPVVEGHEGGLGQAGDIQPVGQLDEPGVLGGQDGLVGTVGVYKEAPADLPQGKIQPAGQDIGEGHGR

SEQ ID NO: 108658 - protein, 112 aa, Unknown
  Obtained from environmental sample
  misc_feature (1)..(112): Xaa is any amino acid
MGLVYFVVVVHPFKRPICGDGHHVELVYLVELRRLRDGGTGHSGEFVVHLEKILEGDGGQRLVLSGDLHPLFRLKRLMEPFAVAASVQYAAGELVYDEYLTVLHHIVDVLLE

SEQ ID NO: 108659 - protein, 102 aa, Unknown
  Obtained from environmental sample
  misc_feature (1)..(102): Xaa is any amino acid
MDNGNHNFARKMPKADNGVQSVAEFGSEDFFHSFVYRAVILNTISKTDKPLANLSRSGVACHYQNYIAEVRLASLIVGKGGIIHNLQEYIEDIAMGFFNFIK

SEQ ID NO: 108660 - protein, 219 aa, Unknown
  Obtained from environmental sample
  DOMAIN (55)...(210): Outer membrane lipoprotein carrier protein LolA
  misc_feature (1)..(219): Xaa is any amino acid
MAEECGRAGGRHAKLLGGFNVLPFLLLPLVIQASDAVPPLVLQEQAMPLWWVRWRQVPAFKTSFTQEGESSAFGKLTKTGTMLAAKGGRLRLEYDKGTLLLSDGRLLTQYDPSTRTAQRFEIDGVLDEWPLLRLLLDPLDVGSAFHVKSLGDGAVALTPKKPGLPEVTLRGDGDFPSKIEWKDATGAMQVLTLTNPKAVPSPKDASFDFVPPKGTKWVK

SEQ ID NO: 108661 - protein, 134 aa, Unknown
  Obtained from environmental sample
  misc_feature (1)..(134): Xaa is any amino acid
MAPQNVRRHDRPRAYRRYVAPRHREGQGRPRLRVHRNARGGQDYRRPHTRPRPELRKGPHPYAVRRVPGLQRHPEQFQLGRDGDRRRLKQRRGRHPRIARKHRVHLDGRTLPRGGDRRGPHANQERLQRPAQNP

SEQ ID NO: 108662 - protein, 216 aa, Unknown
  Obtained from environmental sample
  SIGNAL (1)...(25)
  misc_feature (1)..(216): Xaa is any amino acid
MIIKPSITLLFFFALIISFPAKINAQNTFPRIEPESKALDYYRLGAQSGYSWTALAEIGLWASGDANFSGMDKLKTIVSALNSAINPDLSEKEKAEFILSYMHKNILKNYYLYQTRLDTLLSNGRFNCVSSAVFYIILCKAAGINTSGVMTKDHAFAMVHINGQNFDVETTNQYGFDPGNRKEFHDSSGKTTGFAYVPPQNYRDRQTISQIELLGH

SEQ ID NO: 108663 - protein, 111 aa, Unknown
  Obtained from environmental sample
  misc_feature (1)..(111): Xaa is any amino acid
MNLQKQFXFPYNKEVLDGKPGIVYLCEGAIDTLTLLGHNFCAVGIPGVNTFKPEWVEMFKNKKIILCLDNDAAGRASEARISAMLQEAGLETFSLDLLPEGKDINSWFVNR

SEQ ID NO: 108664 - protein, 187 aa, Unknown
  Obtained from environmental sample
  DOMAIN (63)...(107): LysM domain
  misc_feature (1)..(187): Xaa is any amino acid
MQLPAVGSYVIVPIPANGTVPSSLASHLNVSEWETPGKHLAWERELLQGEYCSVSRIGKKIAYKVGDGETLQSISNAFNVTVKDLLAWNYLANPQQSLKSGRTLFIYLPDSPAKASKTANNTEDNAKYSGKRVIRPGETVYGISIELGVPIIDFANINKLNERCPIITPGYVLRYAPPANKTKDVKK

SEQ ID NO: 108665 - protein, 245 aa, Unknown
  Obtained from environmental sample
  DOMAIN (71)...(236): Caudovirus prohead protease
  misc_feature (1)..(245): Xaa is any amino acid
MRCKNFIVAWIQRHPCRKRIGGFMIIRNKSGEFVAGNASNLLDFLGVKKEAAGIQKISSDVELIAFVPFIKEQIEKSNEQLTMNNEKGVAWTLSTYDLDRFGERIDPQGWDFKRYMNNPVVEWAHRFDIPAIGKIEELSVDDNGLHGVVIFNSKEYDAFGWSIGERVKNGVIRAGSVGFRVIEIEIPSKEDSKDGTNLIFRKQELLEFSICNVPANPFALAKSTVNEKSDPAIPFWNCLINNLQE

SEQ ID NO: 108666 - protein, 102 aa, Unknown
  Obtained from environmental sample
  misc_feature (1)..(102): Xaa is any amino acid
MPTFVEPDMPVCAAMAVFSPIVTLWAMWIKLSNFTPLPITVGSKLPRSIVVPAPMSASSSTTTLPKQGMRTKTPFLSRALPKPSLPSTAPDCIITRAPIHVP

SEQ ID NO: 108667 - protein, 113 aa, Unknown
  Obtained from environmental sample
  misc_feature (1)..(113): Xaa is any amino acid
MTGNGQIGRYNHNFQFVNLAEFGGLRVRGAGHARYFRVKPEIILEGDSRQRAVALGDLYPFFCLYRLVQAVRIAPAVQNASGKFIDDLHLAVLHHIVNVQMKKFRASALPRPI

SEQ ID NO: 108668 - protein, 108 aa, Unknown
  Obtained from environmental sample
  misc_feature (1)..(108): Xaa is any amino acid
MPPVLRPLSPSSARLWSWLLTMGTTVFPSVKARIDTSGPIKNSSITTSFPAAPNALSSIIFFIAASPSVLSLQIITPFPSARPSAFTTSGYFALSIYIRARVKSEKTS

SEQ ID NO: 108669 - protein, 99 aa, Unknown
  Obtained from environmental sample
  misc_feature (1)..(99): Xaa is any amino acid
MMAEFRASDDDNYYAHVEIAINDQLVLSLCEKEYCGRSFTNGDSMEFWLTFDDEQSLNKAYEVLKENAEINYPLAPCEWSKAMAGLKDKYGIQWLLNVF

SEQ ID NO: 108670 - protein, 109 aa, Unknown
  Obtained from environmental sample
  misc_feature (1)..(109): Xaa is any amino acid
MIRSAETACYGTTEYPEDMTCVTLTVKNAQNEEVISYNYKCREIKSADAVCVSAEIGAINTRVDFEPSGNTEGYVREGYAFSPMFTLGLKKKIGEGGEFVSWLRLKKAK

SEQ ID NO: 108671 - protein, 154 aa, Unknown
  Obtained from environmental sample
  SIGNAL (1)...(23)
  misc_feature (1)..(154): Xaa is any amino acid
MNSMNKKSVLLVFLLLLSSSLFAQPFGLKMGMTLNEVKNVCSRIAVIPYLNNYYRIEPPRRSPFFSSYSAYIHPVYGLHKVKAQSNNIFTDGRGEEIRKSFNELIATISATYGKYYLYDSIDKNSPLTKEDDWMISLIRGDRLCCNMEKGTRPI

SEQ ID NO: 108672 - protein, 116 aa, Unknown
  Obtained from environmental sample
  misc_feature (1)..(116): Xaa is any amino acid
MIAMKQIAIGEGLEDMQEFRQDTTVIETDIHYPTNNSLVWDCMKECERLLKHLKEEIETLEFEKYQKSAKKIYFKINVEKNEEERVKLFKKQLETFTNCIKQAANIVKKRTNTEEQ

SEQ ID NO: 108673 - protein, 173 aa, Unknown
  Obtained from environmental sample
  SIGNAL (1)...(72)
  misc_feature (1)..(173): Xaa is any amino acid
MSSCTPAGKSSSITLFLRFAFGNNAFAIRGAPLVSRKSPGISTMVLLRQLMRRRLSLFTSAMITASRFSAAAALIKASASSDEQSTAILSWDSEIASSVPSRPAYFFGAASRFMSRPPASSPTATETPPAPKSLQRLIRRLTSLLRKRRCSFRSSTAFPFCTSAPALSTDSPV

SEQ ID NO: 108674 - protein, 225 aa, Unknown
  Obtained from environmental sample
  misc_feature (1)..(225): Xaa is any amino acid
MRKAAYFDERLVRRFQAPGFQHKALRRVSRPRAERVRRHQDAHAAPLPPAVQDVRDHLRRYGVDPAERLVEYQERRIAYKRPRHGDAFQLRGGEGFGKPLLDTFGDAELVHQRPHPLLYRLGAQIRLAALERQGDVVEGGVVGYQRVPLKDVAHGPPPSVQLVARHVRYLFAVPQNGAAPRLDQAGADFEQRGFPAPAAPPEEGHAPGRQRKVRTIQYSIFPVPI

SEQ ID NO: 108675 - protein, 142 aa, Unknown
  Obtained from environmental sample
  misc_feature (1)..(142): Xaa is any amino acid
MPLRYVCDYRFPFCICCFINLVLHIVSDARFVRGYNPSWHIVDFQKFRCFGFCRTCHAGEFFVHTEEILESYGCKGLVFPADLHVLFCFNGLVNALRIAATFHQATCVFVNYYNLSISNNIINILYKNIVSLYRLQNIMHPV

SEQ ID NO: 108676 - protein, 135 aa, Unknown
  Obtained from environmental sample
  misc_feature (1)..(135): Xaa is any amino acid
MKKLDTGKVFDLGGLHIEVIGMGGHTAGSIGILAQEKKVLLTSDSATPQVWMFKIESLSVKEYIAMLERVVQLDFDNFITGHTDEIMPKSDFYRYINAARHLSVEKSEPFKYHPELKGLLYREDGVEIVFSEAKL

SEQ ID NO: 108677 - protein, 311 aa, Unknown
  Obtained from environmental sample
  misc_feature (1)..(311): Xaa is any amino acid
MGGIYTGGGWTNLGNKGRPTSPPKDAGQPMWNQIYLLLSGSYKPDTFYICMFDEYDESTAIMKAGRDYFDIPADQWFLTLSIDGWWLSSDYYLRVAGAGIEIIKGRRTAAETIDIPHSLGPLYYRNSFEKRDGWRNVTNVSPAQQAQNVPIEGVREKVPDLALDPCLKNPAQLTNKGSGSVELTANDIVKTPGKSGEFVFQFEGTVSGNGSAYYKIGDVKINANAALQLKYSLKPQNDAGRGVFVDILFSDDSLLSETPNSGVIARRGTVDDWTDVTVDIPAGKEITGVVAGYSGNGGFSAQGMMYILGRI

SEQ ID NO: 108678 - protein, 107 aa, Unknown
  Obtained from environmental sample
  misc_feature (1)..(107): Xaa is any amino acid
MVAGAVELRDQHRGRHGRADRHAYEYEHNRKADRHRAYGVLAHEAAYPDGVYETVARAEEVSEKHGHGEAEQVPRDIALGQVLAEFFLLWVRACVYVCVFVHYYLAT

SEQ ID NO: 108679 - protein, 153 aa, Unknown
  Obtained from environmental sample
  DOMAIN (1)...(151): Bacterial transcription activator, effector binding domain
  misc_feature (1)..(153): Xaa is any amino acid
MNFRIVDKQALTLAGRRGFMEDDLWGLCKNEKGFFDRLAKIDIEKPNKNLAYCIGGGSEGKSPWIVGVETNSKELDGLDIIDVPKSLWLVFESHGPMKPNFFDMQNEVYNGYFIDPSREYNWNDGMRSFEKYCTADVNVKDTLIELWCPVVKI

SEQ ID NO: 108680 - protein, 115 aa, Unknown
  Obtained from environmental sample
  misc_feature (1)..(115): Xaa is any amino acid
MRFIGAAFELGMKLNPGEKTAIRKLNRLNKAAVRRHATDNHPFASQSLAVVIVEFKAVAVSFAYFFRVVQPVQQRSLRDFTRIRAQPHGAARADHAGLIGHQVNDPMGRNFVKFT

SEQ ID NO: 108681 - protein, 101 aa, Unknown
  Obtained from environmental sample
  misc_feature (1)..(101): Xaa is any amino acid
MMGSSIASSKDRSSIDNSSADNSSVDDSSADNSFSAGTSSDDISAGDVSDASLSPVMPRSSRESTSREGSVKGSSIPSVDNTGSSMTASERSKFMWSSSSR

SEQ ID NO: 108682 - protein, 126 aa, Unknown
  Obtained from environmental sample
  misc_feature (1)..(126): Xaa is any amino acid
MGDKVAGTDASLISGRADKNXRREGAAFAFDAKSGGFLLIGFRERYAQPAVADHAGTDKFVNGTFGVIDGNGEAQSHIAAARRITGYPCVNADNLAADINQRAARIARVYRRVGLYKIIDISAQPA

SEQ ID NO: 108683 - protein, 104 aa, Unknown
  Obtained from environmental sample
  misc_feature (1)..(104): Xaa is any amino acid
MFCLANSSALHCLICDFCSSARNFASGFLQIPSRGGHPCLWLTLPAAIRVADFHRQVTAHAGRTKKAVSHKMEDCFSSRSRTRTYDLRVMSFPKYGLLKRITYH

SEQ ID NO: 108684 - protein, 170 aa, Unknown
  Obtained from environmental sample
  misc_feature (1)..(170): Xaa is any amino acid
MVDMMKSGIIDPAKVTPLGPCKSGHPSPGLFLTTEWPHSEIPPKKRKPPPNPGGRKWGGFGGMALLKRSPFSFFTGEPREKGLKGEPLFLSFGNLEIGKIWLYLKKLGLFPPPPKEKKIFFFFGGGGVFFFFKPPPKKRKTFFFKNPGEKSSLFLPAGGGKKRPPSCAGG

SEQ ID NO: 108685 - protein, 288 aa, Unknown
  Obtained from environmental sample
  misc_feature (1)..(288): Xaa is any amino acid
MAESHHHVARIFHLVGSFFQKILKFLTFKRKGAQIHYGHSHKHSGVSAKSPNLYPLGARPSLLFAGRGVVEKRGLGRVERPFLQPTLEFGTGGLRWRDRRRLQPDEPLHGASGDPGFGQLRLQSRAGRRLRGHSLRLPQLLRPLRAASRARLLRQRDQGLPIHRLAPHAGALVRRQAVKSYRRHRSHRQPQPAGIQRLQGLLERWRSGRPPPRQGHYKRGAVRRRRDQGHGQGRGDQGRTACDDRQRDRPPVYRYGQEMRHPPQPAEGGRQERQGSVHPAPRHRRYAR

SEQ ID NO: 108686 - protein, 790 aa, Unknown
  Obtained from environmental sample
  SIGNAL (1)...(40)
  misc_feature (1)..(790): Xaa is any amino acid
MINLRMGHTYMMRFFKRRIARIKLVLAAVGIMAAATQVWAQDGGLPGGLLITDRWRHAYSMYSGVTNPAFVNEENYMSLRFLFASTLDVFNMQEAGFHMPIGLYDAAGVSWIMHGTSTYEATDNGGNPTGKKIADQGHLIAFTYANNVWKGLTVGGNVNVILQNIADIPAEDVVGNAMRFGFGVDVGLTYKVMRHQLLGNHILGLSTNNIFNMILDTDERYAAALRFSLLSDFWERRIYFGADFVLKDILSDDAKDWASTELKAMPWENTYKVGANILRIFKLYMLFGLNNDGMDHYGFAFGANMPGFFNGRDIEGMMQFVSIANPSSGKAEANASHITFYARTELGKHREEIYARNMARRGTLGPNNLYNQALELYFKGEYYRAYWIFSQIAVEYPDFFRNDMVSYYQGACIEGMDMRQSAVMAFKRTKEEHSRSVAVPMADLGLMRVFYRSGDYAAVQSQFDELNALGVPDSIKYHAYYIMGQTNIQRGDYQGARQLFTMIPENHPDYVFAYHAAAVANAMAENYQGAIADLEFVIQIKPKNKAQEEAINRSYVFLGFLYYEDLSTEGALARAVTALRKVPKNSYYYQDALLGLGWTGLKARQWGDCLSAGAELAKVATDPVLQSEGNLLQAYAQAMQKNYSQAVNLLEEANKKLSSYTGPDQSDLAASRNDYENVRSDYETMGVRVDELGQARQSSVVQTSIDSLQNLQSKGKASIDQHLKFEDEFKRKTFFSRNIETVKEDITFASARFARYAGSSGARDAIKKGGSGGAIDDEIEKLKKELEKAK

SEQ ID NO: 108687 - protein, 182 aa, Unknown
  Obtained from environmental sample
  misc_feature (1)..(182): Xaa is any amino acid
MDNMISPFSIKTESGKMLEKMLFDKVIGIGIDRNDCWITNLIKVFLIKDSHIYAARMKDLLVETRSELKLHEYGRKSINWLFKELIIANPEIIITLGQDVIDIILAEADPSDNFEWFSAELKSLNGKCKPIKIKGREFNILSLKHPGYFLHDDYNGTKQDKVKNFIQYSVPNAKLEISKINI

SEQ ID NO: 108688 - protein, 228 aa, Unknown
  Obtained from environmental sample
  misc_feature (1)..(228): Xaa is any amino acid
MAKCIFSIVGGASRKGCRTPVHGGRPAPRRPAVRAGRQGGEEPRVAGPMPQFRPLPETRLGAVHRAKTRRRHGLSRRRRRLGTRSGEDVAGIPAAGRQGPSLHSNAPLPSGAGREGITVRGRIGKSKDDVSRGGQPAKIGNVIDAMLEKWLPGFHVVCKEWEVVDRWHEIVTGRIAEESECSRVENGVLYVRIESSTWRQEATYLKEQIKASVRRVTECETIKDIVFY

SEQ ID NO: 108689 - protein, 230 aa, Unknown
  Obtained from environmental sample
  misc_feature (1)..(230): Xaa is any amino acid
MAQVSEDGKKLVAACPNSPAFRDYMKKWIEVVCSCDIETVFWDEPHFYFEKNNPALRACYCKHCSGTSKQKSLISFLAFLTEEVHKLGKRNSVCLLPPWFPAGLENWNEVAELPFVDEVGSDPYWEKGDNLTKVQESYSEVSTRIAELAKKYGKEAQMWIKNYHIEAGTEHFITESTQIASGAGIKNIFAWSYLGSKYMDFLRSENPEAVWRTQIKAFSLAKTWSLEPRV

SEQ ID NO: 108690 - protein, 108 aa, Unknown
  Obtained from environmental sample
  SIGNAL (1)...(27)
  misc_feature (1)..(108): Xaa is any amino acid
MILFPSAVISLSPCSSLYSFITLLTIAWPLLEKSKCPLSSRICVPTTSLIYTGYFKVIRLSSLTFVATPPMWKVRIVSWVPGCPMDCAAIVPTASPISTARFVARLRP

SEQ ID NO: 108691 - protein, 152 aa, Unknown
  Obtained from environmental sample
  misc_feature (1)..(152): Xaa is any amino acid
MTLQTVYDFEEGSSAIKTTRKILNMSKPAEVEFDEYITACYGTTEYPEDMTCVTLTVRSANNNVNGSDYRGTEIEKVINYNYKCREVKASGKVYASAEIGAINTRVDFEPSGNAEAYAREGYAFSPMFTLGLKKKIGDEGEFVSWLRLKKAE

SEQ ID NO: 108692 - protein, 137 aa, Unknown
  Obtained from environmental sample
  misc_feature (1)..(137): Xaa is any amino acid
MQMTSWPFWLIMASTPMAVLPIWRSPMMSSRWPRPMGVMASMAFMPVYMGSWTPLREMMPGATTSMRPNSLASMGPLPSRGWPTPSTTRPRRASPTGTWAMRPVRLTKSPSLICSTSPKTATPTLSSSRLRTMPRIP

SEQ ID NO: 108693 - protein, 131 aa, Unknown
  Obtained from environmental sample
  misc_feature (1)..(131): Xaa is any amino acid
MKLLGKAVELLDRAGRLFGVCGVALGHLVHIRYGVGYLMYTRRLFVGGCRYSGDEVADFVRAVNDFSERFCDFFCNLHPVIGVFDRLLDQIGGIFRRFGAAHREAAHLLGHNGEALAGLARPRRLHSRVEG

SEQ ID NO: 108694 - protein, 128 aa, Unknown
  Obtained from environmental sample
  misc_feature (1)..(128): Xaa is any amino acid
MDRQPRTTATLQQNVNTLQQSVNTLQQSVDQMTPRLQQAERDLQTEKAETARLSQTVTTRENTINERENTIRTRDNTIARQETTIANRNDVITRIRSEVELDRDYDDIPPSEIKTRIARIQNALRSLN

SEQ ID NO: 108695 - protein, 116 aa, Unknown
  Obtained from environmental sample
  misc_feature (1)..(116): Xaa is any amino acid
MVVFVFFPDAVKYLQGFVYAGFLNKNSLEPALKGRIFLKVFAVFRKRSRAYALYVASGKARFKHIGSVNCSFRPSGADYGMYLVDEQNNISGLCNFPGDFFYSFLKFAPVLGSGDY

SEQ ID NO: 108696 - protein, 123 aa, Unknown
  Obtained from environmental sample
  misc_feature (1)..(123): Xaa is any amino acid
MNSLTLPALPVAITMLLSDDNINQPPLNDNYIPHRLTVDKLLDLVHRHCRGFQLFLTGVVRRLELAAQFSVDLHHHGDHAVQRHSLVPLRPFRVDQESFPAKLLPQLVAQVRGVGAYQLDKRD

SEQ ID NO: 108697 - protein, 129 aa, Unknown
  Obtained from environmental sample
  misc_feature (1)..(129): Xaa is any amino acid
MTRSDWPRFFALKYISYRAAAGSFRGDMADSRTAGRAGKAPVGYQRHIGVKPHPDNRRSRLKHLAHTGAAGGPFVADDNNVTLLNLTAVNSGGGRLLAVKHPRRSGEVVHFRPHRTALYHRAVRRKIAE

SEQ ID NO: 108698 - protein, 144 aa, Unknown
  Obtained from environmental sample
  misc_feature (1)..(144): Xaa is any amino acid
MAQNRPRDFPASDSSAYVDLDWEKLRIYFLVEADLDKAIEARMNEILAGAKKQDWRSRCEAAQYLLDSEKDMPKAMKLIEESIKIRQTPQNLYVKAQILKWAGNAAEAAKTLDQAIELAKTQNAPTAVAKPMEITRTQWLGQRR

SEQ ID NO: 108699 - protein, 233 aa, Unknown
  Obtained from environmental sample
  misc_feature (1)..(233): Xaa is any amino acid
MSALMPEGIFSSIVWAGIFADDDNSNWRKEFTRNHTLLGMISMPDDLFYPTAATTTIMIAKAHIPQQDDDKVFMARIWNDGYEKLKGRRIICDGSQLPMTLSAFHKFLGGDDVKSENIITIESKNIINGNEWSPQQWLPKVRISKNEMLNLEKDVRMSMFRAITAMPNLADITLDNFTTIWNDLPELPFSLTRPTSFFFNVHNGKSSGEKNYREGDFPYISSGDTNNSIIRLI
